(19) United States
(12) Patent Application Publication
(10) Pub. No.: US 2013/0254941 A1
(43) Pub. Date: Sep. 26, 2013

(54) METHODS AND COMPOSITIONS FOR WEED CONTROL

(71) Applicants: DANIEL ADER, (US); John J Finnessy, (US); Zhaolong Li, (US); Mahak Kapoor, (US); Ronak Hasmukh Shah, (US); Nengbing Tao, (US); Dafu Wang, (US)

(72) Inventors: DANIEL ADER, (US); John J Finnessy, (US); Zhaolong Li, (US); Mahak Kapoor, (US); Ronak Hasmukh Shah, (US); Nengbing Tao, (US); Dafu Wang, (US)

(21) Appl. No.: 13/612,985

(22) Filed: Sep. 13, 2012

Related U.S. Application Data
(60) Provisional application No. 61/534,086, filed on Sep. 13, 2011.

(51) Int. Cl. C12N 15/113; A01N 57/16; A01N 41/06

(52) U.S. Cl. CPC C12N 15/1137; A01N 41/06; A01N 57/16
USPC 800/286; 504/333; 504/118; 504/196; 800/278; 800/285; 536/23.6; 435/91.1

(57) ABSTRACT

Novel compositions for use to enhance weed control. Specifically, the present invention provides for methods and compositions that modulate protoporphyrinogen IX oxidase in weed species. The present invention also provides for combinations of compositions and methods that enhance weed control.

[0001] This application claims benefit under 35USC §119(e) of U.S. provisional application Ser. No. 61/534,086 filed Sep. 13, 2011, herein incorporated by reference in it's entirety. The sequence listing that is contained in the file named “40_{—}21(58640)B seq listing.txt”, which is 862,548 bytes (measured in operating system MS-Windows) and was created on 4 Sep. 2012, is filed herewith and incorporated herein by reference.

[0002] Table 1 is provided herewith as a part of this U.S. patent application via the USPTO's EFS system in file named “40_{—}21(58640)Btable 1.doxc ” which is 61,788 bytes in size (measured in MS-Windows®). Table 1 (file “40_{—}21(58640)Btable1.doxc” comprises 71 sequences and is herein incorporated by reference in its entirety.

[0003] Table 2 is provided herewith as a part of this U.S. patent application via the USPTO's EFS system in file named “40_{—}21(58640)Btable2.doxc ” which is 161,884 bytes in size (measured in MS-Windows®). Table 2 (file “40_{—}21(58640)Btable2.doxc” comprises 1268 sequences and is herein incorporated by reference in its entirety.

[0004] Table 3 is provided herewith as a part of this U.S. patent application via the USPTO's EFS system in file named “40_{—}21(58640)Btable3.txt ” which is 41,120 bytes in size (measured in MS-Windows®). Table 2 (file “40_{—}21(58640)Btable3.txt” comprises 832 sequences and is herein incorporated by reference in its entirety.

### FIELD

[0005] The methods and compositions generally relates to the field of weed management. More specifically, relates to protoporphyrinogen IX oxidase (PPG oxidase) genes in plants and compositions containing polynucleotide molecules for modulating and/or regulating their expression. Further provided are methods and compositions useful for weed control.

### BACKGROUND

[0006] Weeds are plants that compete with cultivated plants in an agronomic environment and cost farmers billions of dollars annually in crop losses and the expense of efforts to keep weeds under control. Weeds also serve as hosts for crop diseases and insect pests. The losses caused by weeds in agricultural production environments include decreases in crop yield, reduced crop quality, increased irrigation costs, increased harvesting costs, reduced land value, injury to livestock, and crop damage from insects and diseases harbored by the weeds. The principal means by which weeds cause these effects are: 1) competing with crop plants for water, nutrients, sunlight and other essentials for growth and development, 2) production of toxic or irritant chemicals that cause human or animal health problem, 3) production of immense quantities of seed or vegetative reproductive parts or both that contaminate agricultural products and perpetuate the species in agricultural lands, and 4) production on agricultural and nonagricultural lands of vast amounts of vegetation that must be disposed of. Herbicide tolerant weeds are a problem with nearly all herbicides in use, there is a need to effectively manage these weeds. There are over 365 weed biotypes currently identified as being herbicide resistant to one or more herbicides by the Herbicide Resistance Action Committee (HRAC), the North American Herbicide Resistance Action Committee (NAHRAC), and the Weed Science Society of America (WSSA).

### BRIEF DESCRIPTION OF THE FIGURES

[0007] The following drawings form part of the present specification and are included to further demonstrate certain methods, compositions or results. They may be better understood by reference to one or more of these drawings in combination with the detailed description of specific embodiments presented herein. The invention can be more fully understood from the following description of the figures:

[0008] FIG. 1. Treatment of Amaranthus palmeri with ssDNA trigger polynucleotides and PPG oxidase inhibitor herbicide, flumioxazin.

[0009] FIG. 2. Treatment of Amaranthus palmeri with ssDNA trigger polynucleotides and PPG oxidase inhibitor herbicide, fomesafen.

[0010] FIG. 3. Treatment of Amranthus palmeri with pooled oligos and ssDNA trigger polynucleotides and PPG oxidase inhibitor herbicide, Reflex® (fomesafen).

### SUMMARY

[0011] In one aspect, the invention provides a method of plant control comprising an external application to a plant of a composition comprising a polynucleotide and a transfer agent, wherein the polynucleotide is essentially identical or essentially complementary to a PPG oxidase gene sequence or fragment thereof, or to the RNA transcript of said PPG oxidase gene sequence or fragment thereof, wherein said PPG oxidase gene sequence is selected from the group consisting of SEQ ID NO:1-71 or a polynucleotide fragment thereof, whereby the plant growth or development or reproductive ability is reduced or the weedy plant is made more sensitive to a PPG oxidase inhibitor herbicide relative to a plant not treated with said composition. In this manner, plants that have become resistant to the application of PPG oxidase inhibitor contanining herbicides may be made more susceptible to the herbicidal effects of a PPG oxidase inhibitor containing herbicide, thus potentiating the effect of the herbicide. The polynucleotide fragment is at least 18 contiguous nucleotides, at least 19 contiguous nucleotides, at least 20 contiguous nucleotides or at least 21 contiguous nucleotides in length and at least 85 percent identical to a PPG oxidase gene sequence selected from the group consisting of SEQ ID NO:1-71 and the transfer agent is an organosilicone composition or compound. The polynucleotide fragment can also be sense or anti-sense ssDNA or ssRNA, dsRNA, or dsDNA, or dsDNA/RNA hybrids. The composition can include more than one polynucleotide fragments, and the composition can include a PPG oxidase inhibitor herbicide and/or other herbicides that enhance the weed control activity of the composition.

[0012] In another aspect, polynucleotide molecules and methods for modulating PPG oxidase gene expression in weedy plant species are provided. The method reduces, represses or otherwise delays expression of a PPG oxidase gene in a weedy plant comprising an external application to a weedy plant of a composition comprising a polynucleotide and a transfer agent, wherein the polynucleotide is essentially identical or essentially complementary to a PPG oxidase gene sequence or fragment thereof, or to the RNA transcript of the PPG oxidase gene sequence or fragment thereof, wherein the PPG oxidase gene sequence is selected from the group consisting of SEQ ID NO:1-71 or a polynucleotide fragment thereof. The polynucleotide fragment fragment is at least 18 contiguous nucleotides, at least 19 contiguous nucleotides, at least 20 contiguous nucleotides at least 21 contiguous nucleotides in length and at least 85 percent identical to a PPG oxidase gene sequence selected from the group consisting of SEQ ID NO:1-71 and the transfer agent is an organosilicone compound. The polynucleotide fragment can also be sense or anti-sense ssDNA or ssRNA, dsRNA, or dsDNA, or dsDNA/RNA hybrids.

[0013] In a further aspect, the polynucleotide molecule containing composition may be combined with other herbicidal compounds to provide additional control of unwanted plants in a field of cultivated plants.

[0014] In a further aspect, the polynucleotide molecule composition may be combined with any one or more additional agricultural chemicals, such as, insecticides, fungicides, nematocides, bactericides, acaricides, growth regulators, chemosterilants, semiochemicals, repellents, attractants, pheromones, feeding stimulants, biopesticides, microbial pesticides or other biologically active compounds to form a multi-component pesticide giving an even broader spectrum of agricultural protection.

### DETAILED DESCRIPTION

[0015] Provided are methods and compositions containing a polynucleotide that provide for regulation, repression or delay of PPG oxidase (protoporphyrinogen IX oxidase) gene expression and enhanced control of weedy plant species amd importantly PPG oxidase inhibitor resistant weed biotypes. Aspects of the method can be applied to manage various weedy plants in agronomic and other cultivated environments.

[0016] The following definitions and methods are provided to better define the present invention and to guide those of ordinary skill in the art in the practice of the present invention. Unless otherwise noted, terms are to be understood according to conventional usage by those of ordinary skill in the relevant art. Where a term is provided in the singular, the inventors also contemplate aspects of the invention described by the plural of that term.

[0017] By “non-transcribable” polynucleotides is meant that the polynucleotides do not comprise a complete polymerase II transcription unit.

[0018] As used herein “solution” refers to homogeneous mixtures and non-homogeneous mixtures such as suspensions, colloids, micelles, and emulsions.

[0019] Weedy plants are plants that compete with cultivated plants, those of particular importance include, but are not limited to important invasive and noxious weeds and herbicide resistant biotypes in crop production, such as, Amaranthus species—A. albus, A. blitoides, A. hybridus, A. palmeri, A. powellii, A. retroflexus, A. spinosus, A. tuberculatus, and A. viridis; Ambrosia species—A. trifida, A. artemisifolia; Loliumspecies—L. multiflorum, L. rigidium, L perenne; Digitaria species—D. insularis; Euphorbia species—E. heterophylla; Kochia species—K. scoparia; Sorghum species—S. halepense; Conyza species—C. bonariensis, C. canadensis, C. sumatrensis; Chloris species—C. truncate; Echinochola species—E. colona, E. crus-galli; Eleusine species—E. indica; Poa species—P. annua; Plantago species—P. lanceolata; Avena species—A. fatua; Chenopodium species—C. album; Setaria species—S. viridis, Abutilon theophrasti, Ipomoea species, Sesbania, species, Cassia species, Sida species, Brachiaria, species and Solanum species.

[0020] Additional weedy plant species found in cultivated areas include Alopecurus myosuroides, Avena sterilis, Avena sterilis ludoviciana, Brachiaria plantaginea, Bromus diandrus, Bromus rigidus, Cynosurus echinatus, Digitaria ciliaris, Digitaria ischaemum, Digitaria sanguinalis, Echinochloa oryzicola, Echinochloa phyllopogon, Eriochloa punctata, Hordeum glaucum, Hordeum leporinum, Ischaemum rugosum, Leptochloa chinensis, Lolium persicum, Phalaris minor, Phalaris paradoxa, Rottboellia exalta, Setaria faberi, Setaria viridis var, robusta-alba schreiber, Setaria viridis var, robusta-purpurea, Snowdenia polystachea, Sorghum sudanese, Alisma plantago-aquatica, Amaranthus lividus, Amaranthus quitensis, Ammania auriculata, Ammania coccinea, Anthemis cotula, Apera spica-venti, Bacopa rotundifolia, Bidens pilosa, Bidens subalternans, Brassica tournefortii, Bromus tectorum, Camelina microcarpa, Chrysanthemum coronarium, Cuscuta campestris, Cyperus difformis, Damasonium minus, Descurainia sophia, Diplotaxis tenuifolia, Echium plantagineum, Elatine triandra var, pedicellate, Euphorbia heterophylla, Fallopia convolvulus, Fimbristylis miliacea, Galeopsis tetrahit, Galium spurium, Helianthus annuus, Iva xanthifolia, Ixophorus unisetus, Ipomoea indica, Ipomoea purpurea, Ipomoea sepiaria, Ipomoea aquatic, Ipomoea triloba, Lactuca serriola, Limnocharis flava, Limnophila erecta, Limnophila sessiliflora, Lindernia dubia, Lindernia dubia var, major, Lindernia micrantha, Lindernia procumbens, Mesembryanthemum crystallinum, Monochoria korsakowii, Monochoria vaginalis, Neslia paniculata, Papaver rhoeas, Parthenium hysterophorus, Pentzia suffruticosa, Phalaris minor, Raphanus raphanistrum, Raphanus sativus, Rapistrum rugosum, Rotala indica var, uliginosa, Sagittaria guyanensis, Sagittaria montevidensis, Sagittaria pygmaea, Salsola iberica, Scirpus juncoides var, ohwianus, Scirpus mucronatus, Setaria lutescens, Sida spinosa, Sinapis arvensis, Sisymbrium orientale, Sisymbrium thellungii, Solanum ptycanthum, Sonchus aspen, Sonchus oleraceus, Sorghum bicolor, Stellaria media, Thlaspi arvense, Xanthium strumarium, Arctotheca calendula, Conyza sumatrensis, Crassocephalum crepidiodes, Cuphea carthagenenis, Epilobium adenocaulon, Erigeron philadelphicus, Landoltia punctata, Lepidium virginicum, Monochoria korsakowii, Solanum americanum, Solanum nigrum, Vulpia bromoides, Youngia japonica, Hydrilla verticillate, Carduus nutans, Carduus pycnocephalus, Centaurea solstitialis, Cirsium arvense, Commelina diffusa, Convolvulus arvensis, Daucus carota, Digitaria ischaemum, Echinochloa crus-pavonis, Fimbristylis miliacea, Galeopsis tetrahit, Galium spurium, Limnophila erecta, Matricaria perforate, Papaver rhoeas, Ranunculus acris, Soliva sessilis, Sphenoclea zeylanica, Stellaria media, Nassella trichotoma, Stipa neesiana, Agrostis stolonifera, Polygonum aviculare, Alopecurus japonicus, Beckmannia syzigachne, Bromus tectorum, Chloris inflate, Echinochloa erecta, Portulaca oleracea, and Senecio vulgaris. It is believed that all plants contain an protoporphyrinogen IX oxidase gene in their genome, the sequence of which can be isolated and polynucleotides made according to the methods of the present invention that are useful for regulating, suppressing or delaying the expression of the target PPG oxidase gene in the plants and the growth or development of the treated plants.

[0021] Some cultivated plants may also be weedy plants when they occur in unwanted environments. Transgenic crops with one or more herbicide tolerances will need specialized methods of management to control weeds and volunteer crop plants and to target the herbicide tolerance transgene as necessary to permit the treated plants to become sensitive to the herbicide.

[0022] A “trigger” or “trigger polynucleotide” is a polynucleotide molecule that is homologous or complementary to a target gene polynucleotide. The trigger polynucleotide molecules modulate expression of the target gene when topically applied to a plant surface with a transfer agent, whereby a plant treated with said composition has its growth or development or reproductive ability regulated, suppressed or delayed or said plant is more sensitive to a PPG oxidase inhibitor herbicide or mitosis inhibitor herbicide as a result of said polynucleotide containing composition relative to a plant not treated with a composition containing the trigger molecule. Trigger polynucleotides disclosed herein are generally described in relation to the target gene sequence and maybe used in the sense (homologous) or antisense (complementary) orientation as single stranded molecules or comprise both strands as double stranded molecules or nucleotide variants and modified nucleotides thereof depending on the various regions of a gene being targeted.

[0023] It is contemplated that the composition of the present invention will contain multiple polynucleotides and herbicides that include but not limited to PPG oxidase gene trigger polynucleotides and a PPG oxidase inhibitor herbicide and anyone or more additional herbicide target gene trigger polynucleotides and the related herbicides and anyone or more additional essential gene trigger polynucleotides. Essential genes are genes in a plant that provide key enzymes or other proteins, for example, a biosynthetic enzyme, metabolizing enzyme, receptor, signal transduction protein, structural gene product, transcription factor, or transport protein; or regulating RNAs, such as, microRNAs, that are essential to the growth or survival of the organism or cell or involved in the normal growth and development of the plant (Meinke, et al., Trends Plant Sci. 2008 Sep;13(9):483-91). The suppression of an essential gene enhances the effect of a herbicide that affects the function of a gene product different than the suppressed essential gene. The compositions of the present invention can include various trigger polynucleotides that modulate the expression of an essential gene other than PPG oxidase.

[0024] Herbicides for which transgenes for plant tolerance have been demonstrated and the method of the present invention can be applied, include but are not limited to: auxin-like herbicides, glyphosate, glufosinate, sulfonylureas, imidazolinones, bromoxynil, delapon, dicamba, cyclohezanedione, protoporphyrionogen oxidase inhibitors, 4-hydroxyphenyl-pyruvate-dioxygenase inhibitors herbicides. For example, transgenes and their polynucleotide molecules that encode proteins involved in herbicide tolerance are known in the art, and include, but are not limited to an 5-enolpyruvylshikimate-3-phosphate synthase (EPSPS), for example, as more fully described in U.S. Pat. Nos. 7,807,791 (SEQ ID NO:5); 6,248,876 B1; 5,627,061; 5,804,425; 5,633,435; 5,145,783; 4,971,908; 5,462,910; 5,188,642; 4,940,835; 5,866,775; 6,225,114 B1; 6,130,366; 5,460,667; 4,535,060; 4,769,061; 5,633,448; 5,510,471; U.S. Pat. No. Re. 36,449; U.S. Pat. Nos. RE 37,287 E; and 5,491,288; tolerance to sulfonylurea and/or imidazolinone, for example, as described more fully in U.S. Pat. Nos. 5,605,011; 5,013,659; 5,141,870; 5,767,361; 5,746,180; 5,304,732; 4,761,373; 5,346,107; 5,928,937; and 5,378,824; and international publication WO 96/33270; tolerance to hydroxyphenylpyruvatedioxygenases inhibitiong herbicides in plants are described in U.S. Pat. Nos. 6,245,968 B1; 6,268,549; and 6,069,115; US Pat.Pub. 20110191897 and U.S. Pat. No. 7,462,379 SEQ ID NO:3; U.S. Pat. No. 7,935,869; U.S. Pat. No. 7,304,209, SEQ ID NO:1, 3,5 and 15; aryloxyalkanoate dioxygenase polynucleotides, which confer tolerance to 2,4-D and other phenoxy auxin herbicides as well as to aryloxyphenoxypropionate herbicides as described, for example, in WO2005/107437; U.S. Pat. No. 7,838,733 SEQ ID NO:5;) and dicamba-tolerance polynucleotides as described, for example, in Herman et al. (2005) J. Biol. Chem. 280: 24759-24767. Other examples of herbicide-tolerance traits include those conferred by polynucleotides encoding an exogenous phosphinothricin acetyltransferase, as described in U.S. Pat. Nos. 5,969,213; 5,489,520; 5,550,468; 5,874,265; 5,919,675; 5,561,236; 5,648,477; 5,646,024; 6,177,616; and 5,879,903. Plants containing an exogenous phosphinothricin acetyltransferase can exhibit improved tolerance to glufosinate herbicides, which inhibit the enzyme glutamine synthase. Additionally, herbicide-tolerance polynucleotides include those conferred by polynucleotides conferring altered protoporphyrinogen oxidase (protox) activity, as described in U.S. Pat. Nos. 6,288,306 B1; 6,282,837 B1; and 5,767,373; and WO 01/12825. Plants containing such polynucleotides can exhibit improved tolerance to any of a variety of herbicides which target the protox enzyme (also referred to as protox inhibitors). Polynucleotides encoding a glyphosate oxidoreductase and a glyphosate-N-acetyl transferase (GOX described in U.S. Pat. No. 5,463,175 and GAT described in U.S. Patent publication 20030083480, dicamba monooxygenase U.S. Patent publication 20030135879, all of which are incorporated herein by reference); a polynucleotide molecule encoding bromoxynil nitrilase (Bxn described in U.S. Pat. No. 4,810,648 for Bromoxynil tolerance, which is incorporated herein by reference); a polynucleotide molecule encoding phytoene desaturase (crtI) described in Misawa et al, (1993) Plant J. 4:833-840 and Misawa et al, (1994) Plant J. 6:481-489 for norflurazon tolerance; a polynucleotide molecule encoding acetohydroxyacid synthase (AHAS, aka ALS) described in Sathasiivan et al. (1990) Nucl. Acids Res. 18:468-2193 for tolerance to sulfonylurea herbicides; and the bar gene described in DeBlock, et al. (1987) EMBO J. 6:2513-2519 for glufosinate and bialaphos tolerance. The transgenic coding regions and regulatory elements of the herbicide tolerance genes are targets in which polynucleotide triggers and herbicides can be included in the composition of the present invention.

[0025] The composition includes a component that is a PPG oxidase inhibitor herbicide, which include but is not limited to acifluorfen-Na, bifenox, chlomethoxyfen, fluoroglycofen-ethyl, fomesafen, halosafen, lactofen, oxyfluorfen, fluazolate, pyraflufen-ethyl, cinidon-ethyl, flumioxazin, flumiclorac-pentyl, fluthiacet-methyl, thidiazimin, oxadiazon, oxadiargyl, azafenidin, carfentrazone-ethyl, sulfentrazone, pentoxazone. Benzfendizone, butafenacil, pyrazogyl, and profluazol.

[0026] Numerous additional herbicides with similar or different modes of action (herein referred to as co-herbicides) are available that can be added to the composition, for example, members of the herbicide families that include but are not limited to amide herbicides, aromatic acid herbicides, arsenical herbicides, benzothiazole herbicides, benzoylcyclohexanedione herbicides, benzofuranyl alkylsulfonate herbicides, carbamate herbicides, cyclohexene oxime herbicides, cyclopropylisoxazole herbicides, dicarboximide herbicides, dinitroaniline herbicides, dinitrophenol herbicides, diphenyl ether herbicides, dithiocarbamate herbicides, halogenated aliphatic herbicides, imidazolinone herbicides, inorganic herbicides, nitrile herbicides, organophosphorus herbicides, oxadiazolone herbicides, oxazole herbicides, phenoxy herbicides, phenylenediamine herbicides, pyrazole herbicides, pyridazine herbicides, pyridazinone herbicides, pyridine herbicides, pyrimidinediamine herbicides, pyrimidinyloxybenzylamine herbicides, quaternary ammonium herbicides, thiocarbamate herbicides, thiocarbonate herbicides, thiourea herbicides, triazine herbicides, triazinone herbicides, triazole herbicides, triazolone herbicides, triazolopyrimidine herbicides, uracil herbicides, and urea herbicides. In particular, the rates of use of the added herbicides can be reduced in compositions comprising the polynucleotides. Use rate reductions of the additional added herbicides can be 10-25 percent, 26-50 percent, 51-75 percent or more can be achieved that enhance the activity of the polynucleotides and herbicide composition and is contemplated. Representative co-herbicides of the families include but are not limited to acetochlor, acifluorfen, acifluorfen-sodium, aclonifen, acrolein, alachlor, alloxydim, allyl alcohol, ametryn, amicarbazone, amidosulfuron, aminopyralid, amitrole, ammonium sulfamate, anilofos, asulam, atraton, atrazine, azimsulfuron, BCPC, beflubutamid, benazolin, benfluralin, benfuresate, bensulfuron, bensulfuron-methyl, bensulide, bentazone, benzfendizone, benzobicyclon, benzofenap, bifenox, bilanafos, bispyribac, bispyribac-sodium, borax, bromacil, bromobutide, bromoxynil, butachlor, butafenacil, butamifos, butralin, butroxydim, butylate, cacodylic acid, calcium chlorate, cafenstrole, carbetamide, carfentrazone, carfentrazone-ethyl, CDEA, CEPC, chlorflurenol, chlorflurenol-methyl, chloridazon, chlorimuron, chlorimuron-ethyl, chloroacetic acid, chlorotoluron, chlorpropham, chlorsulfuron, chlorthal, chlorthal-dimethyl, cinidon-ethyl, cinmethylin, cinosulfuron, cisanilide, clethodim, clodinafop, clodinafop-propargyl, clomazone, clomeprop, clopyralid, cloransulam, cloransulam-methyl, CMA, 4-CPB, CPMF, 4-CPP, CPPC, cresol, cumyluron, cyanamide, cyanazine, cycloate, cyclosulfamuron, cycloxydim, cyhalofop, cyhalofop-butyl, 2,4-D, 3,4-DA, daimuron, dalapon, dazomet, 2,4-DB, 3,4-DB, 2,4-DEB, desmedipham, dicamba, dichlobenil, ortho-dichlorobenzene, para-dichlorobenzene, dichlorprop, dichlorprop-P, diclofop, diclofop-methyl, diclosulam, difenzoquat, difenzoquat metilsulfate, diflufenican, diflufenzopyr, dimefuron, dimepiperate, dimethachlor, dimethametryn, dimethenamid, dimethenamid-P, dimethipin, dimethylarsinic acid, dinitramine, dinoterb, diphenamid, diquat, diquat dibromide, dithiopyr, diuron, DNOC, 3,4-DP, DSMA, EBEP, endothal, EPTC, esprocarb, ethalfluralin, ethametsulfuron, ethametsulfuron-methyl, ethofumesate, ethoxyfen, ethoxysulfuron, etobenzanid, fenoxaprop-P, fenoxaprop-P-ethyl, fentrazamide, ferrous sulfate, flamprop-M, flazasulfuron, florasulam, fluazifop, fluazifop-butyl, fluazifop-P, fluazifop-P-butyl, flucarbazone, flucarbazone-sodium, flucetosulfuron, fluchloralin, flufenacet, flufenpyr, flufenpyr-ethyl, flumetsulam, flumiclorac, flumiclorac-pentyl, flumioxazin, fluometuron, fluoroglycofen, fluoroglycofen-ethyl, flupropanate, flupyrsulfuron, flupyrsulfuron-methyl-sodium, flurenol, fluridone, fluorochloridone, fluoroxypyr, flurtamone, fluthiacet, fluthiacet-methyl, fomesafen, foramsulfuron, fosamine, glufosinate, glufosinate-ammonium, glyphosate, halosulfuron, halosulfuron-methyl, haloxyfop, haloxyfop-P, HC-252, hexazinone, imazamethabenz, imazamethabenz-methyl, imazamox, imazapic, imazapyr, imazaquin, imazethapyr, imazosulfuron, indanofan, iodomethane, iodosulfuron, iodosulfuron-methyl-sodium, ioxynil, isoproturon, isouron, isoxaben, isoxachlortole, isoxaflutole, karbutilate, lactofen, lenacil, linuron, MAA, MAMA, MCPA, MCPA-thioethyl, MCPB, mecoprop, mecoprop-P, mefenacet, mefluidide, mesosulfuron, mesosulfuron-methyl, mesotrione, metam, metamifop, metamitron, metazachlor, methabenzthiazuron, methylarsonic acid, methyldymron, methyl isothiocyanate, metobenzuron, metolachlor, S-metolachlor, metosulam, metoxuron, metribuzin, metsulfuron, metsulfuron-methyl, MK-66, molinate, monolinuron, MSMA, naproanilide, napropamide, naptalam, neburon, nicosulfuron, nonanoic acid, norflurazon, oleic acid (fatty acids), orbencarb, orthosulfamuron, oryzalin, oxadiargyl, oxadiazon, oxasulfuron, oxaziclomefone, oxyfluorfen, paraquat, paraquat dichloride, pebulate, pendimethalin, penoxsulam, pentachlorophenol, pentanochlor, pentoxazone, pethoxamid, petrolium oils, phenmedipham, phenmedipham-ethyl, picloram, picolinafen, pinoxaden, piperophos, potassium arsenite, potassium azide, pretilachlor, primisulfuron, primisulfuron-methyl, prodiamine, profluazol, profoxydim, prometon, prometryn, propachlor, propanil, propaquizafop, propazine, propham, propisochlor, propoxycarbazone, propoxycarbazone-sodium, propyzamide, prosulfocarb, prosulfuron, pyraclonil, pyraflufen, pyraflufen-ethyl, pyrazolynate, pyrazosulfuron, pyrazosulfuron-ethyl, pyrazoxyfen, pyribenzoxim, pyributicarb, pyridafol, pyridate, pyriftalid, pyriminobac, pyriminobac-methyl, pyrimisulfan, pyrithiobac, pyrithiobac-sodium, quinclorac, quinmerac, quinoclamine, quizalofop, quizalofop-P, rimsulfuron, sethoxydim, siduron, simazine, simetryn, SMA, sodium arsenite, sodium azide, sodium chlorate, sulcotrione, sulfentrazone, sulfometuron, sulfometuron-methyl, sulfosate, sulfosulfuron, sulfuric acid, tar oils, 2,3,6-TBA, TCA, TCA-sodium, tebuthiuron, tepraloxydim, terbacil, terbumeton, terbuthylazine, terbutryn, thenylchlor, thiazopyr, thifensulfuron, thifensulfuron-methyl, thiobencarb, tiocarbazil, topramezone, tralkoxydim, tri-allate, triasulfuron, triaziflam, tribenuron, tribenuron-methyl, tricamba, triclopyr, trietazine, trifloxysulfuron, trifloxysulfuron-sodium, trifluralin, triflusulfuron, triflusulfuron-methyl, trihydroxytriazine, tritosulfuron, [3-[2-chloro-4-fluoro-54-methyl-6-trifluoromethyl-2,4-dioxo-, 2,3,44- etrahydropyrimidin-3-yl)phenoxy]-2-pyridyloxy]acetic acid ethyl ester (CAS RN 353292-3-6), 4-[(4,5-dihydro-3-methoxy-4-methyl-5-oxo)-H-, 2,4-triazol-ylcarbonyl-sulfamoyl]-5-methylthiophene-3-carboxylic acid (BAY636), BAY747 (CAS RN 33504-84-2), topramezone (CAS RN 2063-68-8), 4-hydroxy-3-[[2-[(2-methoxyethoxy)methyl]-6-(trifluoro-methyl)-3-pyridi-nyl]carbonyl]-bicyclo[3.2.]oct-3-en-2-one (CAS RN 35200-68-5), and 4-hydroxy-3-[[2-(3-methoxypropyl)-6-(difluoromethyl)-3-pyridinyl]carbon- y1]-bicyclo[3.2.]oct-3-en-2-one. Additionally, including herbicidal compounds of unspecified modes of action as described in CN101279950A, CN101279951A, DE10000600A1, DE10116399A1, DE102004054666A1, DE102005014638A1, DE102005014906A1, DE102007012168A1, DE102010042866A1, DE10204951A1, DE10234875A1, DE10234876A1, DE10256353A1, DE10256354A1, DE10256367A1, EP1157991A2, EP1238586A1, EP2147919A1, EP2160098A2, JP03968012B2, JP2001253874A, JP2002080454A, JP2002138075A, JP2002145707A, JP2002220389A, JP2003064059A, JP2003096059A, JP2004051628A, JP2004107228A, JP2005008583A, JP2005239675A, JP2005314407A, JP2006232824A, JP2006282552A, JP2007153847A, JP2007161701A, JP2007182404A, JP2008074840A, JP2008074841A, JP2008133207A, JP2008133218A, JP2008169121A, JP2009067739A, JP2009114128A, JP2009126792A, JP2009137851A, US20060111241A1, US20090036311A1, US20090054240A1, US20090215628A1, US20100099561A1, US20100152443A1, US20110105329A1, US20110201501A1, WO2001055066A2, WO2001056975A1, WO2001056979A1, WO2001090071A2, WO2001090080A1, WO2002002540A1 , WO2002028182A1, WO2002040473A1, WO2002044173A2, WO2003000679A2, WO2003006422A1 , WO2003013247A1, WO2003016308A1, WO2003020704A1, WO2003022051A1, WO2003022831A1, WO2003022843A1, WO2003029243A2, WO2003037085A1, WO2003037878A1, WO2003045878A2, WO2003050087A2, WO2003051823A1, WO2003051824A1, WO2003051846A2, WO2003076409A1, WO2003087067A1, WO2003090539A1, WO2003091217A1, WO2003093269A2, WO2003104206A2, WO2004002947A1, WO2004002981A2, WO2004011429A1, WO2004029060A1, WO2004035545A2, WO2004035563A1, WO2004035564A1, WO2004037787A1, WO2004067518A1, WO2004067527A1, WO2004077950A1, WO2005000824A1, WO2005007627A1, WO2005040152A1, WO2005047233A1, WO2005047281A1, WO2005061443A2, WO2005061464A1, WO2005068434A1, WO2005070889A1, WO2005089551A1, WO2005095335A1, WO2006006569A1, WO2006024820A1, WO2006029828A1, WO2006029829A1, WO2006037945A1, WO2006050803A1, WO2006090792A1, WO2006123088A2, WO2006125687A1, WO2006125688A1, WO2007003294A1, WO2007026834A1, WO2007071900A1, WO2007077201A1, WO2007077247A1, WO2007096576A1, WO2007119434A1, WO2007134984A1, WO2008009908A1, WO2008029084A1, WO2008059948A1, WO2008071918A1, WO2008074991A1, WO2008084073A1, WO2008100426A2, WO2008102908A1, WO2008152072A2, WO2008152073A2, WO2009000757A1, WO2009005297A2, WO2009035150A2, WO2009063180A1, WO2009068170A2, WO2009068171A2, WO2009086041A1, WO2009090401A2, WO2009090402A2, WO2009115788A1, WO2009116558A1, WO2009152995A1, WO2009158258A1, WO2010012649A1, WO2010012649A1, WO2010026989A1, WO2010034153A1, WO2010049270A1, WO2010049369A1, WO2010049405A1, WO2010049414A1, WO2010063422A1, WO2010069802A1, WO2010078906A2, WO2010078912A1, WO2010104217A1, WO2010108611A1, WO2010112826A3, WO2010116122A3, WO2010119906A1, WO2010130970A1, WO2011003776A2, WO2011035874A1, WO2011065451A1, all of which are incorporated herein by reference.

[0027] An agronomic field in need of plant control is treated by application of the composition directly to the surface of the growing plants, such as by a spray. For example, the method is applied to control weeds in a field of crop plants by spraying the field with the composition.. The composition can be provided as a tank mix, a sequential treatment of components (generally the polynucleotide containing composition followed by the herbicide), or a simultaneous treatment or mixing of one or more of the components of the composition from separate containers. Treatment of the field can occur as often as needed to provide weed control and the components of the composition can be adjusted to target specific weed species or weed families through utilization of specific polynucleotides or polynucleotide compositions capable of selectively targeting the specific species or plant family to be controlled. The composition can be applied at effective use rates according to the time of application to the field, for example, preplant, at planting, post planting, post harvest. PPG oxidase inhibitor herbicides can be applied to a field at rates of 100 to 500 g ai/ha (active ingredient per hectare) or more. The polynucleotides of the composition can be applied at rates of 1 to 30 grams per acre depending on the number of trigger molecules needed for the scope of weeds in the field.

[0028] Crop plants in which weed control is needed include but are not limited to, i) corn, soybean, cotton, canola, sugar beet, alfalfa, sugarcane, rice, and wheat; ii) vegetable plants including, but not limited to, tomato, sweet pepper, hot pepper, melon, watermelon, cucumber, eggplant, cauliflower, broccoli, lettuce, spinach, onion, peas, carrots, sweet corn, Chinese cabbage, leek, fennel, pumpkin, squash or gourd, radish, Brussels sprouts, tomatillo, garden beans, dry beans, or okra; iii) culinary plants including, but not limited to, basil, parsley, coffee, or tea; or , iv) fruit plants including but not limited to apple, pear, cherry, peach, plum, apricot, banana, plantain, table grape, wine grape, citrus, avocado, mango, or berry; v) a tree grown for ornamental or commercial use, including, but not limited to, a fruit or nut tree; or, vi) an ornamental plant (e. g., an ornamental flowering plant or shrub or turf grass). The methods and compositions provided herein can also be applied to plants produced by a cutting, cloning, or grafting process (i. e., a plant not grown from a seed) include fruit trees and plants that include, but are not limited to, citrus, apples, avocados, tomatoes, eggplant, cucumber, melons, watermelons, and grapes as well as various ornamental plants.

### Pesticidal Mixtures

[0029] The polynucleotide compositions may also be used as mixtures with various agricultural chemicals and/or insecticides, miticides and fungicides, pesticidal and biopesticidal agents. Examples include but are not limited to azinphos-methyl, acephate, isoxathion, isofenphos, ethion, etrimfos, oxydemeton-methyl, oxydeprofos, quinalphos, chlorpyrifos, chlorpyrifos-methyl, chlorfenvinphos, cyanophos, dioxabenzofos, dichlorvos, disulfoton, dimethylvinphos, dimethoate, sulprofos, diazinon, thiometon, tetrachlorvinphos, temephos, tebupirimfos, terbufos, naled, vamidothion, pyraclofos, pyridafenthion, pirimiphos-methyl, fenitrothion, fenthion, phenthoate, flupyrazophos, prothiofos, propaphos, profenofos, phoxime, phosalone, phosmet, formothion, phorate, malathion, mecarbam, mesulfenfos, methamidophos, methidathion, parathion, methyl parathion, monocrotophos, trichlorphon, EPN, isazophos, isamidofos, cadusafos, diamidaphos, dichlofenthion, thionazin, fenamiphos, fosthiazate, fosthietan, phosphocarb, DSP, ethoprophos, alanycarb, aldicarb, isoprocarb, ethiofencarb, carbaryl, carbosulfan, xylylcarb, thiodicarb, pirimicarb, fenobucarb, furathiocarb, propoxur, bendiocarb, benfuracarb, methomyl, metolcarb, XMC, carbofuran, aldoxycarb, oxamyl, acrinathrin, allethrin, esfenvalerate, empenthrin, cycloprothrin, cyhalothrin, gamma-cyhalothrin, lambda-cyhalothrin, cyfluthrin, beta-cyfluthrin, cypermethrin, alpha-cypermethrin, zeta-cypermethrin, silafluofen, tetramethrin, tefluthrin, deltamethrin, tralomethrin, bifenthrin, phenothrin, fenvalerate, fenpropathrin, furamethrin, prallethrin, flucythrinate, fluvalinate, flubrocythrinate, permethrin, resmethrin, ethofenprox, cartap, thiocyclam, bensultap, acetamiprid, imidacloprid, clothianidin, dinotefuran, thiacloprid, thiamethoxam, nitenpyram, chlorfluazuron, diflubenzuron, teflubenzuron, triflumuron, novaluron, noviflumuron, bistrifluoron, fluazuron, flucycloxuron, flufenoxuron, hexaflumuron, lufenuron, chromafenozide, tebufenozide, halofenozide, methoxyfenozide, diofenolan, cyromazine, pyriproxyfen, buprofezin, methoprene, hydroprene, kinoprene, triazamate, endosulfan, chlorfenson, chlorobenzilate, dicofol, bromopropylate, acetoprole, fipronil, ethiprole, pyrethrin, rotenone, nicotine sulphate, BT (Bacillus Thuringiensis) agent, spinosad, abamectin, acequinocyl, amidoflumet, amitraz, etoxazole, chinomethionat, clofentezine, fenbutatin oxide, dienochlor, cyhexatin, spirodiclofen, spiromesifen, tetradifon, tebufenpyrad, binapacryl, bifenazate, pyridaben, pyrimidifen, fenazaquin, fenothiocarb, fenpyroximate, fluacrypyrim, fluazinam, flufenzin, hexythiazox, propargite, benzomate, polynactin complex, milbemectin, lufenuron, mecarbam, methiocarb, mevinphos, halfenprox, azadirachtin, diafenthiuron, indoxacarb, emamectin benzoate, potassium oleate, sodium oleate, chlorfenapyr, tolfenpyrad, pymetrozine, fenoxycarb, hydramethylnon, hydroxy propyl starch, pyridalyl, flufenerim, flubendiamide, flonicamid, metaflumizole, lepimectin, TPIC, albendazole, oxibendazole, oxfendazole, trichlamide, fensulfothion, fenbendazole, levamisole hydrochloride, morantel tartrate, dazomet, metam-sodium, triadimefon, hexaconazole, propiconazole, ipconazole, prochloraz, triflumizole, tebuconazole, epoxiconazole, difenoconazole, flusilazole, triadimenol, cyproconazole, metconazole, fluquinconazole, bitertanol, tetraconazole, triticonazole, flutriafol, penconazole, diniconazole, fenbuconazole, bromuconazole, imibenconazole, simeconazole, myclobutanil, hymexazole, imazalil, furametpyr, thifluzamide, etridiazole, oxpoconazole, oxpoconazole fumarate, pefurazoate, prothioconazole, pyrifenox, fenarimol, nuarimol, bupirimate, mepanipyrim, cyprodinil, pyrimethanil, metalaxyl, mefenoxam, oxadixyl, benalaxyl, thiophanate, thiophanate-methyl, benomyl, carbendazim, fuberidazole, thiabendazole, manzeb, propineb, zineb, metiram, maneb, ziram, thiuram, chlorothalonil, ethaboxam, oxycarboxin, carboxin, flutolanil, silthiofam, mepronil, dimethomorph, fenpropidin, fenpropimorph, spiroxamine, tridemorph, dodemorph, flumorph, azoxystrobin, kresoxim-methyl, metominostrobin, orysastrobin, fluoxastrobin, trifloxystrobin, dimoxystrobin, pyraclostrobin, picoxystrobin, iprodione, procymidone, vinclozolin, chlozolinate, flusulfamide, dazomet, methyl isothiocyanate, chloropicrin, methasulfocarb, hydroxyisoxazole, potassium hydroxyisoxazole, echlomezol, D-D, carbam, basic copper chloride, basic copper sulfate, copper nonylphenolsulfonate, oxine copper, DBEDC, anhydrous copper sulfate, copper sulfate pentahydrate, cupric hydroxide, inorganic sulfur, wettable sulfur, lime sulfur, zinc sulfate, fentin, sodium hydrogen carbonate, potassium hydrogen carbonate, sodium hypochlorite, silver, edifenphos, tolclofos-methyl, fosetyl, iprobenfos, dinocap, pyrazophos, carpropamid, fthalide, tricyclazole, pyroquilon, diclocymet, fenoxanil, kasugamycin, validamycin, polyoxins, blasticiden S, oxytetracycline, mildiomycin, streptomycin, rape seed oil, machine oil, benthiavalicarbisopropyl, iprovalicarb, propamocarb, diethofencarb, fluoroimide, fludioxanil, fenpiclonil, quinoxyfen, oxolinic acid, chlorothalonil, captan, folpet, probenazole, acibenzolar-S-methyl, tiadinil, cyflufenamid, fenhexamid, diflumetorim, metrafenone, picobenzamide, proquinazid, famoxadone, cyazofamid, fenamidone, zoxamide, boscalid, cymoxanil, dithianon, fluazinam, dichlofluanide, triforine, isoprothiolane, ferimzone, diclomezine, tecloftalam, pencycuron, chinomethionat, iminoctadine acetate, iminoctadine albesilate, ambam, polycarbamate, thiadiazine, chloroneb, nickel dimethyldithiocarbamate, guazatine, dodecylguanidine-acetate, quintozene, tolylfluanid, anilazine, nitrothalisopropyl, fenitropan, dimethirimol, benthiazole, harpin protein, flumetover, mandipropamide and penthiopyrad.

[0030] Polynucleotides

[0031] As used herein, the term “DNA”, “DNA molecule”, “DNA polynucleotide molecule” refers to a single-stranded DNA (ssDNA) or double-stranded DNA (dsDNA) molecule of genomic or synthetic origin, such as, a polymer of deoxyribonucleotide bases or a DNA polynucleotide molecule. As used herein, the term “DNA sequence”, “DNA nucleotide sequence” or “DNA polynucleotide sequence” refers to the nucleotide sequence of a DNA molecule. As used herein, the term “RNA”, “RNA molecule”, “RNA polynucleotide molecule” refers to a single-stranded RNA (ssRNA) or double-stranded RNA (dsRNA) molecule of genomic or synthetic origin, such as, a polymer of ribonucleotide bases that comprise single or double stranded regions. Unless otherwise stated, nucleotide sequences in the text of this specification are given, when read from left to right, in the 5′ to 3′ direction. The nomenclature used herein is that required by Title 37 of the United States Code of Federal Regulations §1.822 and set forth in the tables in WIPO Standard ST.25 (1998), Appendix 2, Tables 1 and 3.

[0032] As used herein, “polynucleotide” refers to a DNA or RNA molecule containing multiple nucleotides and generally refers both to “oligonucleotides” (a polynucleotide molecule of typically 50 or fewer nucleotides in length) and polynucleotides of 51 or more nucleotides. Embodiments include compositions including oligonucleotides having a length of 18-25 nucleotides (18-mers, 19-mers, 20-mers, 21-mers, 22-mers, 23-mers, 24-mers, or 25-mers), for example, oligonucleotides of Table 3 (SEQ ID NO:1382-2221) or fragments thereof or medium-length polynucleotides having a length of 26 or more nucleotides (polynucleotides of 26, 27, 28, 29, 30, 46, 32, 33, 34, 35, 36, 37, 38, 39, 40, 41, 42, 43, 44, 45, 46, 47, 48, 49, 50, 51, 52, 53, 54, 55, 56, 57, 58, 59, 60, about 65, about 70, about 75, about 80, about 85, about 90, about 95, about 100, about 110, about 120, about 130, about 140, about 150, about 160, about 170, about 180, about 190, about 200, about 210, about 220, about 230, about 240, about 250, about 260, about 270, about 280, about 290, or about 300 nucleotides), for example, oligonucleotides of Table 2 (SEQ ID NO:72-1381) or fragments thereof or long polynucleotides having a length greater than about 300 nucleotides (for example, polynucleotides of between about 300 to about 400 nucleotides, between about 400 to about 500 nucleotides, between about 500 to about 600 nucleotides, between about 600 to about 700 nucleotides, between about 700 to about 800 nucleotides, between about 800 to about 900 nucleotides, between about 900 to about 1000 nucleotides, between about 300 to about 500 nucleotides, between about 300 to about 600 nucleotides, between about 300 to about 700 nucleotides, between about 300 to about 800 nucleotides, between about 300 to about 900 nucleotides, or about 1000 nucleotides in length, or even greater than about 1000 nucleotides in length, for example up to the entire length of a target gene including coding or non-coding or both coding and non-coding portions of the target gene), for example, polynucleotides of Table 1 (SEQ ID NO:1-71), wherein the selected polynucleotides or fragments thereof homologous or complementary to SEQ ID NO:1-71 suppresses, represses or otherwise delay the expression of the target PPG oxidase gene. A target gene comprises any polynucleotide molecule in a plant cell or fragment thereof for which the modulation of the expression of the target gene is provided by the methods and compositions. Where a polynucleotide is double-stranded, its length can be similarly described in terms of base pairs. Oligonucleotides and polynucleotides can be made that are essentially identical or essentially complementary to adjacent genetic elements of a gene, for example, spanning the junction region of an intron and exon, the junction region of a promoter and a transcribed region, the junction region of a 5′ leader and a coding sequence, the junction of a 3′ untranslated region and a coding sequence.

[0033] Polynucleotide compositions used in the various embodiments include compositions including oligonucleotides or polynucleotides or a mixture of both, including RNA or DNA or RNA/DNA hybrids or chemically modified oligonucleotides or polynucleotides or a mixture thereof. In some embodiments, the polynucleotide may be a combination of ribonucleotides and deoxyribonucleotides, for example, synthetic polynucleotides consisting mainly of ribonucleotides but with one or more terminal deoxyribonucleotides or synthetic polynucleotides consisting mainly of deoxyribonucleotides but with one or more terminal dideoxyribonucleotides. In some embodiments, the polynucleotide includes non-canonical nucleotides such as inosine, thiouridine, or pseudouridine. In some embodiments, the polynucleotide includes chemically modified nucleotides. Examples of chemically modified oligonucleotides or polynucleotides are well known in the art; see, for example, US Patent Publication 20110171287, US Patent Publication 20110171176, and US Patent Publication 20110152353, US Patent Publication, 20110152346, US Patent Publication 20110160082, herein incorporated by reference. For example, including but not limited to the naturally occurring phosphodiester backbone of an oligonucleotide or polynucleotide can be partially or completely modified with phosphorothioate, phosphorodithioate, or methylphosphonate internucleotide linkage modifications, modified nucleoside bases or modified sugars can be used in oligonucleotide or polynucleotide synthesis, and oligonucleotides or polynucleotides can be labeled with a fluorescent moiety (for example, fluorescein or rhodamine) or other label (for example, biotin).

[0034] The polynucleotides can be single- or double-stranded RNA or single- or double-stranded DNA or double-stranded DNA/RNA hybrids or modified analogues thereof, and can be of oligonucleotide lengths or longer. In more specific embodiments the polynucleotides that provide single-stranded RNA in the plant cell are selected from the group consisting of (a) a single-stranded RNA molecule (ssRNA), (b) a single-stranded RNA molecule that self-hybridizes to form a double-stranded RNA molecule, (c) a double-stranded RNA molecule (dsRNA), (d) a single-stranded DNA molecule (ssDNA), (e) a single-stranded DNA molecule that self-hybridizes to form a double-stranded DNA molecule, and (f) a single-stranded DNA molecule including a modified Pol III gene that is transcribed to an RNA molecule, (g) a double-stranded DNA molecule (dsDNA), (h) a double-stranded DNA molecule including a modified Pol III gene that is transcribed to an RNA molecule, (i) a double-stranded, hybridized RNA/DNA molecule, or combinations thereof. In some embodiments these polynucleotides include chemically modified nucleotides or non-canonical nucleotides. In some embodiments, the oligonucleotides may be blunt-ended or may comprise a 3′ overhang of from 1-5 nucleotides of at least one or both of the strands. Other configurations of the oligonucleotide are known in the field and are contemplated herein. In embodiments of the method the polynucleotides include double-stranded DNA formed by intramolecular hybridization, double-stranded DNA formed by intermolecular hybridization, double-stranded RNA formed by intramolecular hybridization, or double-stranded RNA formed by intermolecular hybridization. In one embodiment the polynucleotides include single-stranded DNA or single-stranded RNA that self-hybridizes to form a hairpin structure having an at least partially double-stranded structure including at least one segment that will hybridize to RNA transcribed from the gene targeted for suppression. Not intending to be bound by any mechanism, it is believed that such polynucleotides are or will produce single-stranded RNA with at least one segment that will hybridize to RNA transcribed from the gene targeted for suppression. In certain other embodiments the polynucleotides further includes a promoter, generally a promoter functional in a plant, for example, a pol II promoter, a pol III promoter, a pol IV promoter, or a pol V promoter.

[0035] The term “gene” refers to components that comprise chromosomal DNA, plasmid DNA, cDNA, intron and exon DNA, artificial DNA polynucleotide, or other DNA that encodes a peptide, polypeptide, protein, or RNA transcript molecule, and the genetic elements flanking the coding sequence that are involved in the regulation of expression, such as, promoter regions, 5′ leader regions, 3′ untranslated region that may exist as native genes or transgenes in a plant genome. The gene or a fragment thereof is isolated and subjected to polynucleotide sequencing methods that determines the order of the nucleotides that comprise the gene. Any of the components of the gene are potential targets for a trigger oligonucleotide and polynucleotides.

[0036] The trigger polynucleotide molecules are designed to modulate expression by inducing regulation or suppression of an endogenous PPG oxidase gene in a plant and are designed to have a nucleotide sequence essentially identical or essentially complementary to the nucleotide sequence of an endogenous PPG oxidase gene of a plant or to the sequence of RNA transcribed from an endogenous PPG oxidase gene of a plant, including a transgene in a plant that provides for a herbicide resistant PPG oxidase enzyme, which can be coding sequence or non-coding sequence. Effective molecules that modulate expression are referred to as “a trigger molecule, or trigger polynucleotides”. By “essentially identical” or “essentially complementary” is meant that the trigger polynucleotides (or at least one strand of a double-stranded polynucleotide or portion thereof, or a portion of a single strand polynucleotide) are designed to hybridize to the endogenous gene noncoding sequence or to RNA transcribed (known as messenger RNA or an RNA transcript) from the endogenous gene to effect regulation or suppression of expression of the endogenous gene. Trigger molecules are identified by “tiling” the gene targets with partially overlapping probes or non-overlapping probes of antisense or sense polynucleotides that are essentially identical or essentially complementary to the nucleotide sequence of an endogenous gene. Multiple target sequences can be aligned and sequence regions with homology in common, according to the methods, are identified as potential trigger molecules for the multiple targets. Multiple trigger molecules of various lengths, for example 18-25 nucleotides, 26-50 nucleotides, 51-100 nucleotides, 101-200 nucleotides, 201-300 nucleotides or more can be pooled into a few treatments in order to investigate polynucleotide molecules that cover a portion of a gene sequence (for example, a portion of a coding versus a portion of a noncoding region, or a 5′ versus a 3′ portion of a gene) or an entire gene sequence including coding and noncoding regions of a target gene. Polynucleotide molecules of the pooled trigger molecules can be divided into smaller pools or single molecules inorder to identify trigger molecules that provide the desired effect.

[0037] The target gene RNA and DNA polynucleotide molecules (Table 1, SEQ ID NO:1-71) are sequenced by any number of available methods and equipment. Some of the sequencing technologies are available commercially, such as the sequencing-by-hybridization platform from Affymetrix Inc. (Sunnyvale, Calif.) and the sequencing-by-synthesis platforms from 454 Life Sciences (Bradford, Conn.), Illumina/Solexa (Hayward, Calif.) and Helicos Biosciences (Cambridge, Mass.), and the sequencing-by-ligation platform from Applied Biosystems (Foster City, Calif), as described below. In addition to the single molecule sequencing performed using sequencing-by-synthesis of Helicos Biosciences, other single molecule sequencing technologies are encompassed by the method and include the SMRT™ . . . technology of Pacific Biosciences, the Ion Torrent™ technology, and nanopore sequencing being developed for example, by Oxford Nanopore Technologies. A PPG oxidase target gene comprising DNA or RNA can be isolated using primers or probes essentially complementary or essentially homologous to SEQ ID NO:1-71 or a fragment thereof A polymerase chain reaction (PCR) gene fragment can be produced using primers essentially complementary or essentially homologous to SEQ ID NO:1-71 or a fragment thereof that is useful to isolate a PPG oxidase gene from a plant genome. SEQ ID NO: 1-71 or fragments thereof can be used in various sequence capture technologies to isolate additional target gene sequences, for example, including but not limited to Roche NimbleGen® (Madison, Wis.) and Streptavdin-coupled Dynabeads® (Life Technologies, Grand Island, N.Y.) and US20110015284, herein incorporated by reference in its entirety.

[0038] Embodiments of functional single-stranded polynucleotides have sequence complementarity that need not be 100 percent, but is at least sufficient to permit hybridization to RNA transcribed from the target gene or DNA of the target gene to form a duplex to permit a gene silencing mechanism. Thus, in embodiments, a polynucleotide fragment is designed to be essentially identical to, or essentially complementary to, a sequence of 18 or more contiguous nucleotides in either the target PPG oxidase gene sequence or messenger RNA transcribed from the target gene. By “essentially identical” is meant having 100 percent sequence identity or at least about 83, 84, 85, 86, 87, 88, 89, 90, 91, 92, 93, 94, 95, 96, 97, 98, or 99 percent sequence identity when compared to the sequence of 18 or more contiguous nucleotides in either the target gene or RNA transcribed from the target gene; by “essentially complementary” is meant having 100 percent sequence complementarity or at least about 83, 84, 85, 86, 87, 88, 89, 90, 91, 92, 93, 94, 95, 96, 97, 98, or 99 percent sequence complementarity when compared to the sequence of 18 or more contiguous nucleotides in either the target gene or RNA transcribed from the target gene. In some embodiments, polynucleotide molecules are designed to have 100 percent sequence identity with or complementarity to one allele or one family member of a given target gene (coding or non-coding sequence of a gene); in other embodiments the polynucleotide molecules are designed to have 100 percent sequence identity with or complementarity to multiple alleles or family members of a given target gene. The trigger polynucleotide sequences in the sequence listing SEQ ID NO: 1-2221 or table 1, 2 or 3 maybe complementary or homologous to a portion of the PPG oxidase target gene sequence.

[0039] In certain embodiments, the polynucleotides used in the compositions that are essentially identical or essentially complementary to the target gene or transcript will comprise the predominant nucleic acid in the composition. Thus in certain embodiments, the polynucleotides that are essentially identical or essentially complementary to the target gene or transcript will comprise at least about 50%, 75%, 95%, 98% or 100% of the nucleic acids provided in the composition by either mass or molar concentration. However, in certain embodiments, the polynucleotides that are essentially identical or essentially complementary to the target gene or transcript can comprise at least about 1% to about 50%, about 10% to about 50%, about 20% to about 50%, or about 30% to about 50% of the nucleic acids provided in the composition by either mass or molar concentration. Also provided are compositions where the polynucleotides that are essentially identical or essentially complementary to the target gene or transcript can comprise at least about 1% to 100%, about 10% to 100%, about 20% to about 100%, about 30% to about 50%, or about 50% to a 100% of the nucleic acids provided in the composition by either mass or molar concentration.

[0040] “Identity” refers to the degree of similarity between two polynucleic acid or protein sequences. An alignment of the two sequences is performed by a suitable computer program. A widely used and accepted computer program for performing sequence alignments is CLUSTALW v1.6 (Thompson, et al. Nucl. Acids Res., 22: 4673-4680, 1994). The number of matching bases or amino acids is divided by the total number of bases or amino acids, and multiplied by 100 to obtain a percent identity. For example, if two 580 base pair sequences had 145 matched bases, they would be 25 percent identical. If the two compared sequences are of different lengths, the number of matches is divided by the shorter of the two lengths. For example, if there are 100 matched amino acids between a 200 and a 400 amino acid protein, they are 50 percent identical with respect to the shorter sequence. If the shorter sequence is less than 150 bases or 50 amino acids in length, the number of matches are divided by 150 (for nucleic acid bases) or 50 (for amino acids), and multiplied by 100 to obtain a percent identity.

[0041] Trigger molecules for specific gene family members can be identified from coding and/or non-coding sequences of gene families of a plant or multiple plants, by aligning and selecting 200-300 polynucleotide fragments from the least homologous regions amongst the aligned sequences and evaluated using topically applied polynucleotides (as sense or anti-sense ssDNA or ssRNA, dsRNA, or dsDNA) to determine their relative effectiveness in inducing the herbicidal phenotype. The effective segments are further subdivided into 50-60 polynucleotide fragments, prioritized by least homology, and reevaluated using topically applied polynucleotides. The effective 50-60 polynucleotide fragments are subdivided into 19-30 polynucleotide fragments, prioritized by least homology, and again evaluated for induction of the yield/quality phenotype. Once relative effectiveness is determined, the fragments are utilized singly, or again evaluated in combination with one or more other fragments to determine the trigger composition or mixture of trigger polynucleotides for providing the yield/quality phenotype.

[0042] Trigger molecules for broad activity can be identified from coding and/or non-coding sequences of gene families of a plant or multiple plants, by aligning and selecting 200-300 polynucleotide fragments from the most homologous regions amongst the aligned sequences and evaluated using topically applied polynucleotides (as sense or anti-sense ssDNA or ssRNA, dsRNA, or dsDNA) to determine their relative effectiveness in inducing the yield/quality phenotype. The effective segments are subdivided into 50-60 polynucleotide fragments, prioritized by most homology, and reevaluated using topically applied polynucleotides. The effective 50-60 polynucleotide fragments are subdivided into 19-30 polynucleotide fragments, prioritized by most homology, and again evaluated for induction of the yield/quality phenotype. Once relative effectiveness is determined, the fragments may be utilized singly, or in combination with one or more other fragments to determine the trigger composition or mixture of trigger polynucleotides for providing the yield/quality phenotype.

[0043] Methods of making polynucleotides are well known in the art. Chemical synthesis, in vivo synthesis and in vitro synthesis methods and compositions are known in the art and include various viral elements, microbial cells, modified polymerases, and modified nucleotides. Commercial preparation of oligonucleotides often provides two deoxyribonucleotides on the 3′ end of the sense strand. Long polynucleotide molecules can be synthesized from commercially available kits, for example, kits from Applied Biosystems/Ambion (Austin, Tex.) have DNA ligated on the 5′ end in a microbial expression cassette that includes a bacterial T7 polymerase promoter that makes RNA strands that can be assembled into a dsRNA and kits provided by various manufacturers that include T7 RiboMax Express (Promega, Madison, Wis.), AmpliScribe T7-Flash (Epicentre, Madison, Wis.), and TranscriptAid T7 High Yield (Fermentas, Glen Burnie, Md.). dsRNA molecules can be produced from microbial expression cassettes in bacterial cells (Ongvarrasopone et al. ScienceAsia 33:35-39; Yin, Appl. Microbiol. Biotechno184:323-333, 2009; Liu et al., BMC Biotechnology 10:85, 2010) that have regulated or deficient RNase III enzyme activity or the use of various viral vectors to produce sufficient quantities of dsRNA. PPG oxidase gene fragments are inserted into the microbial expression cassettes in a position in which the fragments are express to produce ssRNA or dsRNA useful in the methods described herein to regulate expression on a target PPG oxidase gene. Long polynucleotide molecules can also be assembled from multiple RNA or DNA fragments. In some embodiments design parameters such as Reynolds score (Reynolds et al. Nature Biotechnology 22, 326-330 (2004),Tuschl rules (Pei and Tuschl, Nature Methods 3(9): 670-676, 2006), i-score (Nucleic Acids Res 35: e123, 2007), i-Score Designer tool and associated algorithms (Nucleic Acids Res 32: 936-948, 2004. Biochem Biophys Res Commun 316: 1050-1058, 2004, Nucleic Acids Res 32: 893-901, 2004, Cell Cycle 3: 790-5, 2004, Nat Biotechnol 23: 995-1001, 2005, Nucleic Acids Res 35: e27, 2007, BMC Bioinformatics 7: 520, 2006, Nucleic Acids Res 35: e123, 2007, Nat Biotechnol 22: 326-330, 2004) are known in the art and may be used in selecting polynucleotide sequences effective in gene silencing. In some embodiments the sequence of a polynucleotide is screened against the genomic DNA of the intended plant to minimize unintentional silencing of other genes.

[0044] The trigger polynucleotide and oligonucleotide molecule compositions are useful in compositions, such as liquids that comprise these polynucleotide molecules, at low concentrations, alone or in combination with other components, for example one or more herbicide molecules, either in the same solution or in separately applied liquids that also provide a transfer agent. While there is no upper limit on the concentrations and dosages of polynucleotide molecules that can useful in the methods, lower effective concentrations and dosages will generally be sought for efficiency. The concentrations can be adjusted in consideration of the volume of spray or treatment applied to plant leaves or other plant part surfaces, such as flower petals, stems, tubers, fruit, anthers, pollen, or seed. In one embodiment, a useful treatment for herbaceous plants using 25-mer oligonucleotide molecules is about 1 nanomole (nmol) of oligonucleotide molecules per plant, for example, from about 0.05 to 1 nmol per plant. Other embodiments for herbaceous plants include useful ranges of about 0.05 to about 100 nmol , or about 0.1 to about 20 nmol, or about 1 nmol to about 10 nmol of polynucleotides per plant. Very large plants, trees, or vines may require correspondingly larger amounts of polynucleotides. When using long dsRNA molecules that can be processed into multiple oligonucleotides, lower concentrations can be used. To illustrate certain embodiments, the factor 1X, when applied to oligonucleotide molecules is arbitrarily used to denote a treatment of 0.8 nmol of polynucleotide molecule per plant; 10×, 8 nmol of polynucleotide molecule per plant; and 100×, 80 nmol of polynucleotide molecule per plant.

[0045] The polynucleotide compositions are useful in compositions, such as liquids that comprise polynucleotide molecules, alone or in combination with other components either in the same liquid or in separately applied liquids that provide a transfer agent. As used herein, a transfer agent is an agent that, when combined with a polynucleotide in a composition that is topically applied to a target plant surface, enables the polynucleotide to enter a plant cell. In certain embodiments, a transfer agent is an agent that conditions the surface of plant tissue, e.g., leaves, stems, roots, flowers, or fruits, to permeation by the polynucleotide molecules into plant cells. The transfer of polynucleotides into plant cells can be facilitated by the prior or contemporaneous application of a polynucleotide-transferring agent to the plant tissue. In some embodiments the transferring agent is applied subsequent to the application of the polynucleotide composition. The polynucleotide transfer agent enables a pathway for polynucleotides through cuticle wax barriers, stomata and/or cell wall or membrane barriers into plant cells. Suitable transfer agents to facilitate transfer of the polynucleotide into a plant cell include agents that increase permeability of the exterior of the plant or that increase permeability of plant cells to oligonucleotides or polynucleotides. Such agents to facilitate transfer of the composition into a plant cell include a chemical agent, or a physical agent, or combinations thereof. Chemical agents for conditioning or transfer include (a) surfactants, (b) an organic solvent or an aqueous solution or aqueous mixtures of organic solvents, (c) oxidizing agents, (d) acids, (e) bases, (f) oils, (g) enzymes, or combinations thereof. Embodiments of the method can optionally include an incubation step, a neutralization step (e.g., to neutralize an acid, base, or oxidizing agent, or to inactivate an enzyme), a rinsing step, or combinations thereof. Embodiments of agents or treatments for conditioning of a plant to permeation by polynucleotides include emulsions, reverse emulsions, liposomes, and other micellar-like compositions. Embodiments of agents or treatments for conditioning of a plant to permeation by polynucleotides include counter-ions or other molecules that are known to associate with nucleic acid molecules, e. g., inorganic ammonium ions, alkyl ammonium ions, lithium ions, polyamines such as spermine, spermidine, or putrescine, and other cations. Organic solvents useful in conditioning a plant to permeation by polynucleotides include DMSO, DMF, pyridine, N-pyrrolidine, hexamethylphosphoramide, acetonitrile, dioxane, polypropylene glycol, other solvents miscible with water or that will dissolve phosphonucleotides in non-aqueous systems (such as is used in synthetic reactions). Naturally derived or synthetic oils with or without surfactants or emulsifiers can be used, e.g., plant-sourced oils, crop oils (such as those listed in the 9^{th} Compendium of Herbicide Adjuvants, publicly available on the worldwide web (internet) at herbicide.adjuvants.com can be used, e.g., paraffinic oils, polyol fatty acid esters, or oils with short-chain molecules modified with amides or polyamines such as polyethyleneimine or N-pyrrolidine. Transfer agents include, but are not limited to, organosilicone preparations.

[0046] Ligands can be tethered to a polynucleotide, for example a dsRNA, ssRNA, dsDNA or ssDNA. Ligands in general can include modifiers, e.g., for enhancing uptake; diagnostic compounds or reporter groups e.g., for monitoring distribution; cross-linking agents; nuclease-resistance conferring moieties; and natural or unusual nucleobases. General examples include lipophiles, lipids (e.g., cholesterol, a bile acid, or a fatty acid (e.g., lithocholic-oleyl, lauroyl, docosnyl, stearoyl, palmitoyl, myristoyl oleoyl, linoleoyl), steroids (e.g., uvaol, hecigenin, diosgenin), terpenes (e.g., triterpenes, e.g., sarsasapogenin, Friedelin, epifriedelanol derivatized lithocholic acid), vitamins (e.g., folic acid, vitamin A, biotin, pyridoxal), carbohydrates, proteins, protein binding agents, integrin targeting molecules, polycationics, peptides, polyamines, and peptide mimics. The ligand may also be a recombinant or synthetic molecule, such as a synthetic polymer, e.g., polyethylene glycol (PEG), PEG-40K, PEG-20K and PEG-5K. Other examples of ligands include lipophilic molecules, e.g, cholesterol, cholic acid, adamantane acetic acid, 1-pyrene butyric acid, dihydrotestosterone, glycerol (e.g., esters and ethers thereof, e.g., C.sub.10, C.sub.11, C.sub.12, C.sub.13, C.sub.14, C.sub.15, C.sub.16, C.sub.17, C.sub.18, C.sub.19, or C.sub.20 alkyl; e.g., lauroyl, docosnyl, stearoyl, oleoyl, linoleoyl 1,3-bis-0(hexadecyl)glycerol, 1,3-bis-0(octaadecyl)glycerol), geranyloxyhexyl group, hexadecylglycerol, borneol, menthol, 1,3-propanediol, heptadecyl group, palmitic acid, myristic acid, 03-(oleoyl)lithocholic acid, O3-(oleoyl)cholenic acid, dodecanoyl, lithocholyl, 5.beta.-cholanyl, N,N-distearyl-lithocholamide, 1,2-di-O-stearoylglyceride, dimethoxytrityl, or phenoxazine) and PEG (e.g., PEG-5K, PEG-20K, PEG-40K). Preferred lipophilic moieties include lipid, cholesterols, oleyl, retinyl, or cholesteryl residues.

[0047] Conjugating a ligand to a dsRNA can enhance its cellular absorption, lipophilic compounds that have been conjugated to oligonucleotides include 1-pyrene butyric acid, 1,3-bis-O-(hexadecyl)glycerol, and menthol. One example of a ligand for receptor-mediated endocytosis is folic acid. Folic acid enters the cell by folate-receptor-radiated endocytosis. dsRNA compounds bearing folic acid would be efficiently transported into the cell via the folate-receptor-mediated endocytosis. Other ligands that have been conjugated to oligonucleotides include polyethylene glycols, carbohydrate clusters, cross-linking agents, porphyrin conjugates, delivery peptides and lipids such as cholesterol. In certain instances, conjugation of a cationic ligand to oligonucleotides results in improved resistance to nucleases. Representative examples of cationic ligands are propylammonium and dimethylpropylammonium. Interestingly, antisense oligonucleotides were reported to retain their high binding affinity to mRNA when the cationic ligand was dispersed, throughout the oligonucleotide. See M. Manoharan Antisense & Nucleic Acid Drug Development 2002, 12, 103 and references therein.

[0048] A biologic delivery can be accomplished by a variety of methods including, without limitation, (1) loading liposomes with a dsRNA acid molecule provided herein and (2) complexing a dsRNA molecule with lipids or liposomes to form nucleic acid-lipid or nucleic acid-liposome complexes. The liposome can be composed of cationic and neutral lipids commonly used to transfect cells in vitro. Cationic lipids can complex (e.g., charge-associate) with negatively charged, nucleic acids to form liposomes. Examples of cationic liposomes include, without limitation, lipofectin, lipofectamine, lipofectace, and DOTAP. Procedures for forming liposomes are well known in the art. Liposome compositions can be formed, for example, from phosphatidylcholine, dimyristoyl phosphatidylcholine, dipalmitoyl phosphatidylcholine, dimyristoyl phosphatidyl glycerol, dioleoyl phosphatidylethanolamine or liposomes comprising dihydrosphingomyelin (DHSM) Numerous lipophilic agents are commercially available, including Lipofectin.®. (Invitrogen/Life Technologies, Carlsbad, Calif.) and Effectene™ (Qiagen, Valencia, Calif.), In addition, systemic delivery methods can be optimized using commercially available cationic lipids such as DDAB or DOTAP, each of which can be mixed with a neutral lipid such as DOPE or cholesterol. In some eases, liposomes such as those described by Templeton et al. Nature Biotechnology, 15:647-652 (1997) can be used. In other embodiments, polycations such as polyethyleneimine can be used to achieve delivery in vivo and ex vivo (Boletta et al., J. Am Soc. Nephrol. 7:1728, 1996). Additional information regarding the use of liposomes to deliver nucleic acids can be found in U.S. Pat. No. 6,271,359, PCT Publication WO 96/40964 and Morrissey, D. et al., 2005, Nature Biotechnol. 23(8):1002-7.

[0049] In certain embodiments, an organosilicone preparation that is commercially available as Silwet® L-77 surfactant having CAS Number 27306-78-1 and EPA Number: CAL.REG.NO. 5905-50073-AA, and currently available from Momentive Performance Materials, Albany, N.Y. can be used to prepare a polynucleotide composition. In certain embodiments where a Silwet L-77 organosilicone preparation is used as a pre-spray treatment of plant leaves or other plant surfaces, freshly made concentrations in the range of about 0.015 to about 2 percent by weight (wt percent) (e. g., about 0.01, 0.015, 0.02, 0.025, 0.03, 0.035, 0.04, 0.045, 0.05, 0.055, 0.06, 0.065, 0.07, 0.075, 0.08, 0.085, 0.09, 0.095, 0.1, 0.2, 0.3, 0.4, 0.5, 0.6, 0.7, 0.8, 0.9, 1.0, 1.1, 1.2, 1.3, 1.4, 1.5, 1.6, 1.7, 1.8, 1.9, 2.0, 2.1, 2.2, 2.3, 2.5 wt percent) are efficacious in preparing a leaf or other plant surface for transfer of polynucleotide molecules into plant cells from a topical application on the surface. In certain embodiments of the methods and compositions provided herein, a composition that comprises a polynucleotide molecule and an organosilicone preparation comprising Silwet L-77 in the range of about 0.015 to about 2 percent by weight (wt percent) (e. g., about 0.01, 0.015, 0.02, 0.025, 0.03, 0.035, 0.04, 0.045, 0.05, 0.055, 0.06, 0.065, 0.07, 0.075, 0.08, 0.085, 0.09, 0.095, 0.1, 0.2, 0.3, 0.4, 0.5, 0.6, 0.7, 0.8, 0.9, 1.0, 1.1, 1.2, 1.3, 1.4, 1.5, 1.6, 1.7, 1.8, 1.9, 2.0, 2.1, 2.2, 2.3, 2.5 wt percent) is used or provided.

[0050] In certain embodiments, any of the commercially available organosilicone preparations provided such as the following Breakthru S 321, Breakthru S 200 Cat# 67674-67-3, Breakthru OE 441 Cat#68937-55-3, Breakthru S 278 Cat #27306-78-1, Breakthru S 243, Breakthru S 233 Cat#134180-76-0, available from manufacturer Evonik Goldschmidt (Germany), Silwet® HS 429, Silwet® HS 312, Silwet® HS 508, Silwet® HS 604 (Momentive Performance Materials, Albany, N.Y.) can be used as transfer agents in a polynucleotide composition. In certain embodiments where an organosilicone preparation is used as a pre-spray treatment of plant leaves or other surfaces, freshly made concentrations in the range of about 0.015 to about 2 percent by weight (wt percent) (e. g., about 0.01, 0.015, 0.02, 0.025, 0.03, 0.035, 0.04, 0.045, 0.05, 0.055, 0.06, 0.065, 0.07, 0.075, 0.08, 0.085, 0.09, 0.095, 0.1, 0.2, 0.3, 0.4, 0.5, 0.6, 0.7, 0.8, 0.9, 1.0, 1.1, 1.2, 1.3, 1.4, 1.5, 1.6, 1.7, 1.8, 1.9, 2.0, 2.1, 2.2, 2.3, 2.5 wt percent) are efficacious in preparing a leaf or other plant surface for transfer of polynucleotide molecules into plant cells from a topical application on the surface. In certain embodiments of the methods and compositions provided herein, a composition that comprises a polynucleotide molecule and an organosilicone preparation in the range of about 0.015 to about 2 percent by weight (wt percent) (e. g., about 0.01, 0.015, 0.02, 0.025, 0.03, 0.035, 0.04, 0.045, 0.05, 0.055, 0.06, 0.065, 0.07, 0.075, 0.08, 0.085, 0.09, 0.095, 0.1, 0.2, 0.3, 0.4, 0.5, 0.6, 0.7, 0.8, 0.9, 1.0, 1.1, 1.2, 1.3, 1.4, 1.5, 1.6, 1.7, 1.8, 1.9, 2.0, 2.1, 2.2, 2.3, 2.5 wt percent) is used or provided.

[0051] Organosilicone preparations used in the methods and compositions provided herein can comprise one or more effective organosilicone compounds. As used herein, the phrase “effective organosilicone compound” is used to describe any organosilicone compound that is found in an organosilicone preparation that enables a polynucleotide to enter a plant cell. In certain embodiments, an effective organosilicone compound can enable a polynucleotide to enter a plant cell in a manner permitting a polynucleotide mediated suppression of a target gene expression in the plant cell. In general, effective organosilicone compounds include, but are not limited to, compounds that can comprise: i) a trisiloxane head group that is covalently linked to, ii) an alkyl linker including, but not limited to, an n-propyl linker, that is covalently linked to, iii) a poly glycol chain, that is covalently linked to, iv) a terminal group. Trisiloxane head groups of such effective organosilicone compounds include, but are not limited to, heptamethyltrisiloxane. Alkyl linkers can include, but are not limited to, an n-propyl linker Poly glycol chains include, but are not limited to, polyethylene glycol or polypropylene glycol. Poly glycol chains can comprise a mixture that provides an average chain length “n” of about “7.5”. In certain embodiments, the average chain length “n” can vary from about 5 to about 14. Terminal groups can include, but are not limited to, alkyl groups such as a methyl group. Effective organosilicone compounds are believed to include, but are not limited to, trisiloxane ethoxylate surfactants or polyalkylene oxide modified heptamethyl trisiloxane.

[chemical structure]

[0052] In certain embodiments, an organosilicone preparation that comprises an organosilicone compound comprising a trisiloxane head group is used in the methods and compositions provided herein. In certain embodiments, an organosilicone preparation that comprises an organosilicone compound comprising a heptamethyltrisiloxane head group is used in the methods and compositions provided herein. In certain embodiments, an organosilicone composition that comprises Compound I is used in the methods and compositions provided herein. In certain embodiments, an organosilicone composition that comprises Compound I is used in the methods and compositions provided herein. In certain embodiments of the methods and compositions provided herein, a composition that comprises a polynucleotide molecule and one or more effective organosilicone compound in the range of about 0.015 to about 2 percent by weight (wt percent) (e. g., about 0.01, 0.015, 0.02, 0.025, 0.03, 0.035, 0.04, 0.045, 0.05, 0.055, 0.06, 0.065, 0.07, 0.075, 0.08, 0.085, 0.09, 0.095, 0.1, 0.2, 0.3, 0.4, 0.5, 0.6, 0.7, 0.8, 0.9, 1.0, 1.1, 1.2, 1.3, 1.4, 1.5, 1.6, 1.7, 1.8, 1.9, 2.0, 2.1, 2.2, 2.3, 2.5 wt percent) is used or provided.

[0053] Compositions include but are not limited components that are one or more polynucleotides essentially identical to, or essentially complementary to a PPG oxidase gene sequence (promoter, intron, exon, 5′ untranslated region, 3′ untranslated region), a transfer agent that provides for the polynucleotide to enter a plant cell, a herbicide that complements the action of the polynucleotide, one or more additional herbicides that further enhance the herbicide activity of the composition or provide an additional mode of action different from the complementing herbicide, various salts and stabilizing agents that enhance the utility of the composition as an admixture of the components of the composition.

[0054] The methods include one or more applications of a polynucleotide composition and one or more applications of a permeability-enhancing agent for conditioning of a plant to permeation by polynucleotides. When the agent for conditioning to permeation is an organosilicone composition or compound contained therein, embodiments of the polynucleotide molecules are double-stranded RNA oligonucleotides, single-stranded RNA oligonucleotides, double-stranded RNA polynucleotides, single-stranded RNA polynucleotides, double-stranded DNA oligonucleotides, single-stranded DNA oligonucleotides, double-stranded DNA polynucleotides, single-stranded DNA polynucleotides, chemically modified RNA or DNA oligonucleotides or polynucleotides or mixtures thereof.

[0055] Compositions and methods are useful for modulating the expression of an endogenous PPG oxidase gene (for example U.S. Pat. Nos. 7,838,263; 6,084,155) or transgenic PPG oxidase gene (U.S. Pat. Nos. 7,842,856; 7,485,777; US Patent Publ. 20070050863) in a plant cell. In various embodiments, a PPG oxidase gene includes coding (protein-coding or translatable) sequence, non-coding (non-translatable) sequence, or both coding and non-coding sequence. Compositions can include polynucleotides and oligonucleotides designed to target multiple genes, or multiple segments of one or more genes. The target gene can include multiple consecutive segments of a target gene, multiple non-consecutive segments of a target gene, multiple alleles of a target gene, or multiple target genes from one or more species.

[0056] A method is provided for modulating expression of a PPG oxidase gene in a plant including (a) conditioning of a plant to permeation by polynucleotides and (b) treatment of the plant with the polynucleotide molecules, wherein the polynucleotide molecules include at least one segment of 18 or more contiguous nucleotides cloned from or otherwise identified from the target PPG oxidase gene in either anti-sense or sense orientation, whereby the polynucleotide molecules permeate the interior of the plant and induce modulation of the target gene. The conditioning and polynucleotide application can be performed separately or in a single step. When the conditioning and polynucleotide application are performed in separate steps, the conditioning can precede or can follow the polynucleotide application within minutes, hours, or days. In some embodiments more than one conditioning step or more than one polynucleotide molecule application can be performed on the same plant. In embodiments of the method, the segment can be cloned or identified from (a) coding (protein-encoding), (b) non-coding (promoter and other gene related molecules), or (c) both coding and non-coding parts of the target gene. Non-coding parts include DNA, such as promoter regions or the RNA transcribed by the DNA that provide RNA regulatory molecules, including but not limited to: introns, 5′ or 3′ untranslated regions, and microRNAs (miRNA), trans-acting siRNAs, natural anti-sense siRNAs, and other small RNAs with regulatory function or RNAs having structural or enzymatic function including but not limited to: ribozymes, ribosomal RNAs, t-RNAs, aptamers, and riboswitches.

[0057] All publications, patents and patent applications are herein incorporated by reference to the same extent as if each individual publication or patent application was specifically and individually indicated to be incorporated by reference.

[0058] The following examples are included to demonstrate examples of certain preferred embodiments. It should be appreciated by those of skill in the art that the techniques disclosed in the examples that follow represent approaches the inventors have found function well in the practice of the invention, and thus can be considered to constitute examples of preferred modes for its practice. However, those of skill in the art should, in light of the present disclosure, appreciate that many changes can be made in the specific embodiments that are disclosed and still obtain a like or similar result without departing from the spirit and scope of the invention.

### EXAMPLES

### Example 1

### Polynucleotides Related to the PPG Oxidase Gene Sequences

[0059] The target PPG oxidase polynucleotide molecule naturally occurs in the genome of Amaranthus albus, Amaranthus graecizans, Amaranthus hybridus, Amaranthus lividus, Amaranthus palmeri, Amaranthus rudis, Amaranthus spinosus, Amaranthus thunbergii, Amaranthus viridis, Ambrosia trifida, Chenopodium album, Commelina diffusa, Conyza canadensis, Digitaria sanguinalis, Euphorbia heterophylla, Kochia scoparia, Lolium multiflorum and include molecules related to the expression of a polypeptide identified as a PPG oxidase, that include regulatory molecules, cDNAs comprising coding and noncoding regions of a PPG oxidase gene and fragments thereof as shown in Table 1.

[0060] Polynucleotide molecules were extracted from these plant species by methods standard in the field, for example, total RNA was extracted using Trizol Reagent (Invitrogen Corp, Carlsbad, Calif. Cat. No. 15596-018), following the manufacturer's protocol or modifications thereof by those skilled in the art of polynucleotide extraction that may enhance recover or purity of the extracted RNA. Briefly, start with 1 gram of ground plant tissue for extraction. Prealiquot 10 milliliters (mL) Trizol reagent to 15 mL conical tubes. Add ground powder to tubes and shake to homogenize. Incubate the homogenized samples for 5 minutes (min) at room temperature (RT) and then add 3 ml, of chloroform. Shakes tubes vigorously by hand for 15-30 seconds(sec) and incubate at RT for 3 min. Centrifuge the tubes at 7,000 revolutions per minute (rpm) for 10 min at 4 degrees C. Transfer the aqueous phase to a new 1.5 mL tube and add 1 volume of cold isopropanol. Incubate the samples for 20-30 min at RT and centrifuge at 10,000 rpm for 10 min at 4 degrees C. Wash pellet with Sigma-grade 80 percent ethanol. Remove the supernatant and briefly air-dry the pellet. Dissolve the RNA pellet in approximately 200 microliters of DEPC treated water. Heat briefly at 65 degrees C. to dissolve pellet and vortex or pipet to resuspend RNA pellet. Adjust RNA concentraiton to 1-2 microgram/microliter.

[0061] DNA was extracted using EZNA SP Plant DNA Mini kit (Omega Biotek, Norcross Ga., Cat#D5511) and Lysing Matrix E tubes (Q-Biogen, Cat#6914), following the manufacturer's protocol or modifications thereof by those skilled in the art of polynucleotide extraction that may enhance recover or purity of the extracted DNA. Briefly, aliquot ground tissue to a Lysing Matrix E tube on dry ice, add 800 μl Buffer SP1 to each sample, homogenize in a bead beater for 35-45sec, incubate on ice for 45-60 sec, centrifuge at >14000 rpm for 1 min at RT, add 10 microliter RNase A to the lysate, incubate at 65° C. for 10min, centrifuge for 1 min at RT, add 280 μl Buffer SP2 and vortex to mix, incubate the samples on ice for 5 min, centrifuge at ≧10,000g for 10 min at RT, transfer the supernatant to a homogenizer column in a 2 ml collection tube, centrifuge at 10,000g for 2 min at RT, transfer the cleared lysate into a 1.5 ml microfuge tube, add 1.5 volumes Buffer SP3 to the cleared lysate, vortex immediately to obtain a homogeneous mixture, transfer up to 650 μl supernatant to the Hi-Bind column, centrifuge at 10,000g for 1 min, repeat, apply 100 μl 65° C. Elution Buffer to the column, centrifuge at 10,000g for 5 min at RT.

[0062] Next-generation DNA sequencers, such as the 454-FLX (Roche, Branford, Conn.), the SOLiD (Applied Biosystems,), and the Genome Analyzer (HiSeq2000, Illumina, San Diego, Calif.) were used to provide polynucleotide sequence from the DNA and RNA extracted from the plant tissues. Raw sequence data is assembled into contigs. The contig sequence is used to identify trigger molecules that can be applied to the plant to enable regulation of the gene expression.

[0063] The target DNA sequence isolated from genomic (gDNA) and coding DNA (cDNA) from the various weedy plant species for the PPG oxidase gene and the assembled contigs as set forth in SEQ ID NOs 1-71 and Table 1 (See supplemental attachment 40_{—}21(58640)Btable1.doxc)

### Example 2

### Polynucleotides Related to the Trigger Molecules

[0064] The gene sequences and fragments of Table 1 were divided into 200 polynucleotide (200-mer) lengths with 25 polynucleotide overlapping regions and are shown in Table 2, SEQ ID NO:72-429. These polynucleotides are tested to select the most efficacious trigger regions across the length of any target sequence. The trigger polynucleotides are constructed as sense or anti-sense ssDNA or ssRNA, dsRNA, or dsDNA, or dsDNA/RNA hybrids and combined with an organosilicone based transfer agent to provide a polynucleotide preparation. The polynucleotides are combined into sets of two to three polynucleotides per set, using 4-8 nmol of each polynucleotide. Each polynucleotide set is prepared with the transfer agent and applied to a plant or a field of plants in combination with a PPG oxidase inhibitor containing herbicide, or followed by a PPG oxidase inhibitor treatment one to three days after the polynucleotide application, to determine the effect on the plant's susceptibility to a PPG oxidase inhibitor. The effect is measured as stunting the growth and/or killing of the plant and is measured 8-14 days after treatment with the polynucleotide set and PPG oxidase inhibitor. The most efficacious sets are identified and the individual polynucleotides are tested in the same methods as the sets are and the most efficacious single 200-mer identified. The 200-mer sequence is divided into smaller sequences of 50-70-mer regions with 10-15 polynucleotide overlapping regions and the polynucleotides tested individually. The most efficacious 50-70-mer is further divided into smaller sequences of 25-mer regions with a 12 to 13 polynucleotide overlapping region and tested for efficacy in combination with PPG oxidase inhibitor treatment. By this method it is possible to identify an oligonucleotide or several oligonucleotides that are the most efficacious trigger molecule to effect plant sensitivity to a PPG oxidase inhibitor or modulation of a PPG oxidase gene expression. The modulation of PPG oxidase gene expression is determined by the detection of PPG oxidase siRNA moleclules specific to a PPG oxidase gene or by an observation of a reduction in the amount of PPG oxidase RNA transcript produced relative to an untreated plant or by merely observing the anticipated phenotype of the application of the trigger with the PPG oxidase inhibitor containing herbicide. Detection of siRNA can be accomplished, for example, using kits such as mirVana (Ambion, Austin Tex.) and mirPremier (Sigma-Aldrich, St Louis, Mo.).

[0065] The target DNA sequence isolated from genomic (gDNA) and coding DNA (cDNA) from the various weedy plant species for the PPG oxidase gene and the assembled contigs as set forth in SEQ ID NOs 1-71 were divided into polynucleotide fragments as shown in Table 2 (See supplemental attachment 40_{—}21(58640)Btable2.docx) and as set forth in SEQ ID NOs 72-1381.

[0066] The gene sequences and fragments of Table 1 were compared and 21-mers of contiguous polynucleotides were identified that had homology across the various PPG oxidase gene sequences. The purpose is to identify trigger molecules that are useful as herbicidal molecules or in combination with a PPG oxidase inhibitor herbicide across a broad range of weed species. The sequences shown in Table 3 represent the 21-mers that were present in the PPG oxidase gene of at least eight of the weed species of Table 1. It is contemplated that additional 21-mers can be selected from the sequences of Table 1 that are specific for a single weed species or a few weeds species within a genus or trigger molecules that are at least 18 contiguous nucleotides, at least 19 contiguous nucleotides, at least 20 contiguous nucleotides or at least 21 contiguous nucleotides in length and at least 85 percent identical to a PPG oxidase gene sequence selected from the group consisting of SEQ ID NO:1-71 or fragment thereof

[0067] By this method it is possible to identify an oligonucleotide or several oligonucleotides that are the most efficacious trigger molecule to effect plant sensitivity to PPG oxidase inhibitor or modulation of PPG oxidase gene expression. The modulation of PPG oxidase gene expression is determined by the detection of PPG oxidase siRNA moleclules specific to PPG oxidase gene or by an observation of a reduction in the amount of PPG oxidase RNA transcript produced relative to an untreated plant. Detection of siRNA can be accomplished, for example, using kits such as mirVana (Ambion, Austin Tex.) and mirPremier (Sigma-Aldrich, St Louis, Mo.).

[0068] The target DNA sequence isolated from genomic (gDNA) and coding DNA (cDNA) from the various weedy plant species for the PPG oxidase gene and the assembled contigs as set forth in SEQ ID NOs 1-71 were divided into fragments as shown in Table 3 (See supplemental attachment 40 21(58640)Btable3.docx) and as set forth in SEQ ID NOs 1382-2221.

### Example 3

### Methods Used Related to Treating Plants or Plant Parts with a Topical Mixture of the Trigger Molecules

[0069] Glyphosate-sensitive Palmer amaranth (A. palmeri R-22) plants were grown in the greenhouse (30/20 C day/night T; 14 hour photoperiod) in 4 inch square pots containing Sun Gro® Redi-Earth and 3.5 kg/cubic meter Osmocote® 14-14-14 fertilizer. Palmer amaranth plants at 5 to 10 cm in height were pre-treated with a mixture of short (24-25mer) single-strand antisense oligo DNA polynucleotides (ssDNA,) targeting PPG oxidase coding or noncoding regions at 16 nmol, formulated in 10 millimolar sodium phosphate buffer (pH 6.8) containing 2% ammonium sulfate and 0.5% Silwet L-77. Plants were treated manually by pipetting 10 μL of polynucleotide solution on four fully expanded mature leaves, for a total of 40 microliters of solution per plant. Twenty-four and forty-eight hours later, the plants were treated with fomesafen (Reflex) at 22 g ai/ha and flumioxazin (Valor) at 4 g ai/ha, crop oil concentrate (COC) at 1% is added to the herbicide treatments. The formulation control is the buffer and adjuvants without the DNA polynucleotides. Four replications of each treatment were conducted. Plant height is determined just before ssDNA treatment and at intervals upto fourteen days (dat) after herbicide treatments to determine effect of the oligonucleotide and herbicide treatments. The results shown in FIG. 1 and FIG. 2 demonstrate that the oligonucleotide treatment enhanced the herbicidal activity of both fomesafen and flumioxazin.

[0070] A pool comprising eight antisense ssDNA oligonucleotides shown in Table 4 was used to in the protocol as described to treat palmer amaranth plants and the individual oligonucleotides and various combinations of oligonucleotides were tested for efficacy. Surprisingly, it was necessary to have a 3 oligonucleotide pool (oligo3, 5,and 7) of the 8 oligonucleotides to reproduce the effect observed with the 8 oligonucleotide pool and combinations of only 2 of the 3 oligonucleotides was not effective to provide enhanced herbicide sensitivity. This result is illustrated in FIG. 3 for activity on Palmer amaranth, the same 3 oligonucleotides were also active on a related species, waterhemp (Amaranthus rudis).

TABLE 4
Antisense ssDNA PPG oxidase oligonucleotides

| | | |
|---|---|---|
| OLIGO1 | SEQ ID NO: 2214 | GTGATATTACCTCCAACACGAT |
| OLIGO2 | SEQ ID NO: 2215 | ATAGTAAGCACAGGATCGGAG |
| OLIGO3 | SEQ ID NO: 2216 | CTTTCAATCCACTGTCAACCG |
| OLIGO4 | SEQ ID NO: 2217 | ATCAAGCGTTCGAAGACCTCAT |
| OLIGO5 | SEQ ID NO: 2218 | CAGCAATGGCGGTAGGTAACA |
| OLIGO6 | SEQ ID NO: 2219 | GCAATTGCCCGAATCCTTTTA |
| OLIGO7 | SEQ ID NO: 2220 | TAGCTCAAtATCAAGGTCCTA |
| OLIGO8 | SEQ ID NO: 2221 | TCATAAGCACCCTCTATACAC |

### Example 4

### A Method to Control Weeds in a Field

[0071] A method to control weeds in a field comprises the use of trigger polynucleotides that can modulate the expression of a PPG oxidase gene in one or more target weed plant species. In Table 3 (SEQ ID NO: 1381-2221), an analysis of PPG oxidase gene sequences from seventeen plant species provided a collection of 21-mer polynucleotides that can be used in compositions to affect the growth or develop or sensitivity to PPG oxidase inhibitor herbicide to control multiple weed species in a field. A composition containing 1 or 2 or 3 or 4 or more of the polynucleotides of Table 3 would enable broad activity of the composition against the multiple weed species that occur in a field environment.

[0072] The method includes creating a composition that comprises components that include at least one polynucleotide of Table 3 or any other effective gene expression modulating polynucleotide essentially identical or essentially complementary to SEQ ID NO:1-71 or fragment thereof, a transfer agent that mobilizes the polynucleotide into a plant cell and a PPG oxidase inhibiting herbicide and optionally a polynucleotide that modulates the expression of an essential gene and optionally a herbicide that has a different mode of action relative to a PPG oxidase inhibitor. The polynucleotide of the composition includes a dsRNA, ssDNA or dsDNA or a combination thereof. A composition containing a polynucleotide can have a use rate of about 1 to 30 grams or more per acre depending on the size of the polynucleotide and the number of polynucleotides in the composition. The composition may include one or more additional herbicides as needed to provide effective multi-species weed control. A field of crop plants in need of weed plant control is treated by spray application of the composition. The composition can be provided as a tank mix, a sequential treatment of components (generally the polynucleotide followed by the herbicide), a simultaneous treatment or mixing of one or more of the components of the composition from separate containers. Treatment of the field can occur as often as needed to provide weed control and the components of the composition can be adjusted to target specific weed species or weed families.

### Example 5

### Herbicidal Compositions Comprising Pesticidal Agents

[0073] A method of controlling weeds and plant pest and pathogens in a field of PPG oxidase inhibitor tolerant crop plants is provided, wherein the method comprises applying a composition comprising a PPG oxidase trigger oligonucleotide, a PPG oxidase inhibitor composition and an admixture of a pest control agent. For example, the admixture comprises insecticides, fungicides, nematocides, bactericides, acaricides, growth regulators, chemosterilants, semiochemicals, repellents, attractants, pheromones, feeding stimulants or other biologically active compounds or biological agents, such as, microorganisms.

[0074] For example, the admixture comprises a fungicide compound for use on a PPG oxidase inhibitor tolerant crop plant to prevent or control plant disease caused by a plant fungal pathogen, The fungicide compound of the admixture may be a systemic or contact fungicide or mixtures of each. More particularly the fungicide compound includes, but is not limited to members of the chemical groups strobilurins, triazoles, chloronitriles, carboxamides and mixtures thereof. The composition may additional have an admixture comprises an insecticidal compound or agent.

[0075] The PPG oxidase trigger oligonucleotides and PPG oxidase inhibitor (for example, fomesafen) tank mixes with fungicides, insecticides or both are tested for use in soybean and corn for control of foliar diseases and pests. Testing is conducted to develop a method for use of mixtures of the trigger oligonucleotides and fomesafen formulation and various commercially available fungicides for weed control and pest control. The field plots are planted with soybeans or corn. All plots receive a post plant application of the PPG oxidase trigger+fomesafen about 3 weeks after planting. The mixtures of trigger+fomesafen or trigger+fomesafen+fungicide+insecticides are used to treat the plots at the R1 stage of soybean development (first flowering) or tassel stage of corn. Data is taken for percent weed control at 7 and 21 days after R1 treatment, soybean safety (% necrosis, chlorosis, growth rate): 5 days after treatment, disease rating, pest ratings and yield (bushels/Acre). These mixtures and treatments are designed to provide simultaneous weed and pest control, such as fungal pest control, for example, leaf rust disease; and insect pest control, for example, aphids, armyworms, loopers, beetles, stinkbugs, and leaf hoppers.

[0076] Agricultural chemicals are provided in containers suitable for safe storage, transportation and distribution, stability of the chemical compositions, mixing with solvents and instructions for use. A container of a mixture of a trigger oligonucleotide+a herbicice+fungicide compound, or a mixture of a trigger oligonucleotide+herbicide compound and an insecticide compound, or a trigger oligonucleotide+a herbicide compound and a fungicide compound and an insecticide compound (for example, lambda-cyhalothrin, Warriert). The container may further provide instructions on the effective use of the mixture. Containers of the present invention can be of any material that is suitable for the storage of the chemical mixture. Containers of the present invention can be of any material that is suitable for the shipment of the chemical mixture. The material can be of cardboard, plastic, metal, or a composite of these materials. The container can have a volume of 0.5 liter, 1 liter, 2 liter, 3-5 liter, 5-10 liter, 10-20 liter, 20-50 liter or more depending upon the need. A tank mix of a trigger oligonucleotide+herbicide compound and a fungicide compound is provided, methods of application to the crop to achieve an effective dose of each compound are known to those skilled in the art and can be refined and further developed depending on the crop, weather conditions, and application equipment used.

[0077] Insecticides, fungicides, nematocides, bactericides, acaricides, growth regulators, chemosterilants, semiochemicals, repellents, attractants, pheromones, feeding stimulants or other biologically active compounds can be added to the trigger oligonucleotide to form a multi-component pesticide giving an even broader spectrum of agricultural protection. Examples of such agricultural protectants with which compounds of this invention can be formulated are: insecticides such as abamectin, acephate, azinphos-methyl, bifenthrin, buprofezin, carbofuran, chlorfenapyr, chlorpyrifos, chlorpyrifos-methyl, cyfluthrin, beta-cyfluthrin, cyhalothrin, lambda-cyhalothrin, deltamethrin, diafenthiuron, diazinon, diflubenzuron, dimethoate, esfenvalerate, fenoxycarb, fenpropathrin, fenvalerate, fipronil, flucythrinate, tau-fluvalinate, fonophos, imidacloprid, isofenphos, malathion, metaldehyde, methamidophos, methidathion, methomyl, methoprene, methoxychlor, methyl 7-chloro-2,5-dihydro-2-[[N-(methoxycarbonyl)-N-[4-(trifluoromethoxy)phenyl ]amino]carbonyl]indeno[1,2-e][1,3,4]oxadiazine-4a(3H)-carboxylate (DPX-JW062), monocrotophos, oxamyl, parathion, parathion-methyl, permethrin, phorate, phosalone, phosmet, phosphamidon, pirimicarb, profenofos, rotenone, sulprofos, tebufenozide, tefluthrin, terbufos, tetrachlorvinphos, thiodicarb, tralomethrin, trichlorfon and triflumuron; most preferably a PPG oxidase inhibitor compound is formulated with a fungicide compound or combinations of fungicides, such as azoxystrobin, benomyl, blasticidin-S, Bordeaux mixture (tribasic copper sulfate), bromuconazole, captafol, captan, carbendazim, chloroneb, chlorothalonil, copper oxychloride, copper salts, cymoxanil, cyproconazole, cyprodinil (CGA 219417), diclomezine, dicloran, difenoconazole, dimethomorph, diniconazole, diniconazole-M, dodine, edifenphos, epoxiconazole (BAS 480F), famoxadone, fenarimol, fenbuconazole, fenpiclonil, fenpropidin, fenpropimorph, fluazinam, fluquinconazole, flusilazole, flutolanil, flutriafol, folpet, fosetyl-aluminum, furalaxyl, hexaconazole, ipconazole, iprobenfos, iprodione, isoprothiolane, kasugamycin, kresoxim-methyl, mancozeb, maneb, mepronil, metalaxyl, metconazole, S-methyl 7-benzothiazolecarbothioate (CGA 245704), myclobutanil, neo-asozin (ferric methanearsonate), oxadixyl, penconazole, pencycuron, probenazole, prochloraz, propiconazole, pyrifenox, pyroquilon, quinoxyfen, spiroxamine (KWG4168), sulfur, tebuconazole, tetraconazole, thiabendazole, thiophanate-methyl, thiram, triadimefon, triadimenol, tricyclazole, trifloxystrobin, triticonazole, validamycin and vinclozolin; combinations of fungicides are common for example, cyproconazole and azoxystrobin, difenoconazole, and metalaxyl-M, fludioxonil and metalaxyl-M, mancozeb and metalaxyl-M, copper hydroxide and metalaxyl-M, cyprodinil and fludioxonil, cyproconazole and propiconazole; commercially available fungicide formulations for control of Asian soybean rust disease include, but are not limited to Quadris® (Syngenta Corp), Bravo® (Syngenta Corp), Echo 720® (Sipcam Agro Inc), Headline® 2.09EC (BASF Corp), Tilt® 3.6EC (Syngenta Corp), PropiMax™ 3.6EC (Dow AgroSciences), Bumper® 41.8EC (MakhteshimAgan), Folicur® 3.6F (Bayer CropScience), Laredo® 25EC (Dow AgroSciences), Laredo™ 25EW (Dow AgroSciences), Stratego® 2.08F (Bayer Corp), Domark™ 125SL (Sipcam Agro USA), and Pristine®38% WDG (BASF Corp) these can be combined with PPG oxidase inhibitor compositions as described in the present invention to provide enhanced protection from fungal disease; nematocides such as aldoxycarb and fenamiphos; bactericides such as streptomycin; acaricides such as amitraz, chinomethionat, chlorobenzilate, cyhexatin, dicofol, dienochlor, etoxazole, fenazaquin, fenbutatin oxide, fenpropathrin, fenpyroximate, hexythiazox, propargite, pyridaben and tebufenpyrad; and biological agents such as Bacillus thuringiensis, Bacillus thuringiensis delta endotoxin, baculovirus, and entomopathogenic bacteria, virus and fungi.

Lengthy table referenced here
US20130254941A1-20130926-T00001
Please refer to the end of the specification for access instructions.

LENGTHY TABLES
The patent application contains a lengthy table section. A copy of the table is available in electronic form from the USPTO web site (http://seqdata.uspto.gov/?pageRequest=docDetail&DocID=US20130254941A1). An electronic copy of the table will also be available from the USPTO upon request and payment of the fee set forth in 37 CFR 1.19(b)(3).

We claim:

1. A method of plant control comprising: treating a plant with a composition comprising a polynucleotide and a transfer agent, wherein said polynucleotide is essentially identical or essentially complementary to a PPG oxidase gene sequence or fragment thereof, or to an RNA transcript of said PPG oxidase gene sequence or fragment thereof, wherein said PPG oxidase gene sequence is selected from the group consisting of SEQ ID NO:1-71 or a polynucleotide fragment thereof, whereby said plant growth or development or reproductive ability is regulated, suppressed or delayed or said plant is more sensitive to a PPG oxidase inhibitor herbicide as a result of said polynucleotide containing composition relative to a plant not treated with said composition.

2. The method as claimed in claim 1, wherein said transfer agent is an organosilicone surfactant composition or compound contained therein.

3. The method as claimed in claim 1, wherein said polynucleotide fragment is 18 contiguous, 19 contiguous nucleotides, 20 contiguous nucleotides or at least 21 contiguous nucleotides in length and at least 85 percent identical to a PPG oxidase gene sequence selected from the group consisting of SEQ ID NO:1-71.

4. The method as claimed in claim 3, wherein said polynucleotide fragment is selected from the group consisting of sense or anti-sense ssDNA or ssRNA, dsRNA, or dsDNA, or dsDNA/RNA hybrids.

5. The method as claimed in claim 1, wherein said plant is selected from the group consisting of Amaranthus albus, Amaranthus graecizans, Amaranthus hybridus, Amaranthus lividus, Amaranthus palmeri, Amaranthus rudis, Amaranthus spinosus, Amaranthus thunbergii, Amaranthus viridis, Ambrosia trifida, Chenopodium album, Commelina diffusa, Conyza canadensis, Digitaria sanguinalis, Euphorbia heterophylla, Kochia scoparia, and Lolium multiflorum.

6. The method as claimed in claim 1, wherein said composition further comprises said PPG oxidase inhibitor herbicide and external application to a plant with said composition.

7. The method as claimed in claim 6, wherein said composition further comprises one or more herbicides different from said PPG oxidase inhibitor herbicide.

8. The method as claimed in claim 3, wherein said composition comprises any combination of two or more of said polynucleotide fragments and external application to a plant with said composition.

9. A composition comprising a polynucleotide and a transfer agent, wherein said polynucleotide is essentially identical or essentially complementary to a PPG oxidase gene sequence, or to an RNA transcript of said PPG oxidase gene sequence, wherein said PPG oxidase gene sequence is selected from the group consisting of SEQ ID NO:1-71 or a polynucleotide fragment thereof and whereby a plant treated with said composition has its growth or development or reproductive ability regulated, suppressed or delayed or said plant is more sensitive to a PPG oxidase inhibitor herbicide or mitosis inhibitor herbicide as a result of said polynucleotide containing composition relative to a plant not treated with said composition.

10. The composition of claim 9, wherein said transfer agent is an organosilicone composition.

11. The composition of claim 9, wherein said polynucleotide fragment is 18 contiguous, 19 contiguous nucleotides, 20 contiguous nucleotides or at least 21 contiguous nucleotides in length and at least 85 percent identical to a PPG oxidase gene sequence selected from the group consisting of SEQ ID NO:1-71.

12. The composition of claim 9, wherein said polynucleotide is selected from the group consisting of SEQ ID NO:72-1381.

13. The composition of claim 9, wherein said polynucleotide is selected from the group consisting of SEQ ID NO: 1382-2221.

14. The composition of claim 9, further comprising a PPG oxidase inhibitor herbicide.

15. The composition of claim 14, wherein said PPG oxidase inhibitor molecule is selected from the group consisting of acifluorfen-Na, bifenox, chlomethoxyfen, chlornitrofen, ethoxyfen-ethtyl, fluoroglycofen-ethyl, fomesafen, halosafen, lactofen, oxyfluorfen, fluazolate, pyraflufen-ethyl, cinidon-ethyl, flumioxazin, flumiclorac-pentyl, fluthiacet-methyl, thidiazimin, oxadiazon, oxadiargyl, pyraclonil, flufenpyr-ethyl, azafenidin, carfentrazone-ethyl, Saflufenacil, sulfentrazone, pentoxazone. benzfendizone, butafenacil, pyrazogyl, and profluazol.

16. The composition of claim 14, further comprising a co-herbicide.

17. A method of reducing expression of a PPG oxidase gene in a plant comprising: external application to a plant of a composition comprising a polynucleotide and a transfer agent, wherein said polynucleotide is essentially identical or essentially complementary to a PPG oxidase gene sequence or fragment thereof, or to the RNA transcript of said PPG oxidase gene sequence or fragment thereof, wherein said PPG oxidase gene sequence is selected from the group consisting of SEQ ID NO:1-71 or a polynucleotide fragment thereof, whereby said expression of said PPG oxidase gene is reduced relative to a plant in which the composition was not applied.

18. The method as claimed in claim 17, wherein said transfer agent is an organosilicone compound.

19. The method as claimed in claim 17, wherein said polynucleotide fragment is 19 contiguous nucleotides, 20 contiguous nucleotides or at least 21 contiguous nucleotides in length and at least 85 percent identical to a PPG oxidase gene sequence selected from the group consisting of SEQ ID NO:1-71.

20. The method as claimed in 17, wherein said polynucleotide molecule is selected from the group consisting of sense or anti-sense ssDNA or ssRNA, dsRNA, or dsDNA, or dsDNA/RNA hybrids.

21. A microbial expression cassette comprising a polynucleotide fragment of 18 contiguous, 19 contiguous nucleotides, 20 contiguous nucleotides or at least 21 contiguous nucleotides in length and at least 85 percent identical to a PPG oxidase gene sequence selected from the group consisting of SEQ ID NO:1-71.

22. A method of making a polynucleotide comprising a) transforming the microbial expression cassette of claim 21 into a microbe; b) growing said microbe; c) harvesting a polynucleotide from said microbe, wherein said polynucleotide is at least 18 contiguous, at least 19 contiguous nucleotides, at least 20 contiguous nucleotides or at least 21 contiguous nucleotides in length and at least 85 percent identical to a PPG oxidase gene sequence selected from the group consisting of SEQ ID NO:1-71.

23. A method of identifying polynucleotides useful in modulating PPG oxidase gene expression when externally treating a plant comprising: a) providing a plurality of polynucleotides that comprise a region essentially identical or essentially complementary to a polynucleotide fragment of 18 contiguous, 19 contiguous nucleotides, 20 contiguous nucleotides or at least 21 contiguous nucleotides in length and at least 85 percent identical to a PPG oxidase gene sequence selected from the group consisting of SEQ ID NO:1-71; b) externally treating said plant with one or more of said polynucleotides and a transfer agent; c) analyzing said plant or extract for modulation of PPG oxidase gene expression, and whereby a plant treated with said composition has its growth or development or reproductive ability regulated, suppressed or delayed or said plant is more sensitive to a PPG oxidase inhibitor herbicide or mitosis inhibitor herbicide as a result of said polynucleotide containing composition relative to a plant not treated with said composition.

24. The method as claimed in 23, wherein said plant is selected from the group consisting of Amaranthus albus, Amaranthus graecizans, Amaranthus hybridus, Amaranthus lividus, Amaranthus palmeri, Amaranthus rudis, Amaranthus spinosus, Amaranthus thunbergii, Amaranthus viridis, Ambrosia trifida, Chenopodium album, Commelina diffusa, Conyza canadensis, Digitaria sanguinalis, Euphorbia heterophylla, Kochia scoparia, and Lolium multiflorum.

25. The method as claimed in 23, wherein said PPG oxidase gene expression is reduced relative to a plant not treated with said polynucleotide fragment and a transfer agent.

26. The method as claimed in 23, wherein said transfer agent is an organosilicone compound.

27. An agricultural chemical composition comprising an admixture of a polynucleotide and a PPG oxidase inhibitor herbicide and a co-herbicide, wherein said polynucleotide is essentially identical or essentially complementary to a portion of a PPG oxidase gene sequence, or to a portion of an RNA transcript of said PPG oxidase gene sequence, wherein said PPG oxidase gene sequence is selected from the group consisting of SEQ ID NO:1-71 or a polynucleotide fragment thereof, and whereby a plant treated with said composition has its growth or development or reproductive ability regulated, suppressed or delayed or said plant is more sensitive to a PPG oxidase inhibitor herbicide or mitosis inhibitor herbicide as a result of said polynucleotide containing composition relative to a plant not treated with said composition.

28. The agricultural chemical composition of claim 27, wherein said co-herbicide is selected from the group consisting of amide herbicides, arsenical herbicides, benzothiazole herbicides, benzoylcyclohexanedione herbicides, benzofuranyl alkylsulfonate herbicides, cyclohexene oxime herbicides, cyclopropylisoxazole herbicides, dicarboximide herbicides, dinitroaniline herbicides, dinitrophenol herbicides, dithiocarbamate herbicides, glycine herbicides, halogenated aliphatic herbicides, imidazolinone herbicides, inorganic herbicides, nitrile herbicides, organophosphorus herbicides, oxadiazolone herbicides, oxazole herbicides, phenoxy herbicides, phenylenediamine herbicides, pyridazine herbicides, pyridazinone herbicides, pyridine herbicides, pyrimidinediamine herbicides, pyrimidinyloxybenzylamine herbicides, quaternary ammonium herbicides, thiocarbamate herbicides, thiocarbonate herbicides, thiourea herbicides, triazine herbicides, triazinone herbicides, triazolone herbicides, triazolopyrimidine herbicides, uracil herbicides, and urea herbicides.

29. An agricultural chemical composition comprising an admixture of a polynucleotide and a PPG oxidase inhibitor herbicide and a pesticide, wherein said polynucleotide is essentially identical or essentially complementary to a portion of a PPG oxidase gene sequence, or to a portion of an RNA transcript of said PPG oxidase gene sequence, wherein said PPG oxidase gene sequence is selected from the group consisting of SEQ ID NO:1-71 or a polynucleotide fragment thereof, whereby a field of crop plants in need of weed and pest control are treated with said composition, and whereby a plant treated with said composition has its growth or development or reproductive ability regulated, suppressed or delayed or said plant is more sensitive to a PPG oxidase inhibitor herbicide or mitosis inhibitor herbicide as a result of said polynucleotide containing composition relative to a plant not treated with said composition.

30. The agricultural chemical composition of claim 29, wherein said pesticide is selected from the group consisting of insecticides, fungicides, nematocides, bactericides, acaricides, growth regulators, chemosterilants, semiochemicals, repellents, attractants, pheromones, feeding stimulants, and biopesticides.

31. A herbicide mixture comprising a PPG oxidase inhibitor and a polynucleotide mixture comprising SEQ ID NO: 2216, 2218 and 2220, and whereby a plant treated with said composition has its growth or development or reproductive ability regulated, suppressed or delayed or said plant is more sensitive to a PPG oxidase inhibitor herbicide or mitosis inhibitor herbicide as a result of said polynucleotide containing composition relative to a plant not treated with said composition.

The application's sequence listing, which the Patent Office published only in electronic form, follows.

SEQUENCE LISTING (2222 sequences)

SEQ ID NO: 1 - DNA, 1200 bp, Amaranthus albus
ggaatccttgatttgaagataggataaccagagagagtgcgagagagatgagtgcgatggcgttatcgagcagcattctacaatgtccgccgcactccgacatctcgttccgcttttttgctcatacacgaacccactcccccatcttcttcagaagaccacgaaaattatcatatatccattgttccacaagctcaagctcaactgccaattaccagaacacgattacgagccaaggagaaggagaaaaagtattagattgtgtaattgttggagctggtatcagtggactttgcattgctcaggctctttctaccaaacacattcaatccaatctcaatttcattgtcactgaagctaaacatcgtgttggaggtaatatcactaccatggagtccgatggctatatctgggaagagggtcctaatagtttccaaccctccgatcctgtgcttactatggcggttgacagtggattgaaagacgatttggtcttgggagatcctaatgcccctcgtttcgtgctgtggaatggtaaattaaggcctgttccttccaaacctacggaccttcccttttttgatctcatgagctttcctggtaagattagggctggtcttggtgcacttggtcttcgtcctcctcctcctccttcttcttatgaggaatccgttgaagaatttgtgcgccgtaatctcggcgatgaggtcttcgaacgcttgattgaacccttttgttctggtgtctatgctggtgatcctgcaaagttgagtatgaaagctgcatttggaaaggtctggaccttagagcaaaagggtggtagtatcatcgccggtacactcaaaactattcaggaaaggaagaataatcctccaccccctcgagacccccgccttcctaaacctaagggccagactgttggatcctttaggaaaggactcattatgttacctaccgccattgctgctaggcttggcagtaaagtcaaactatcgtggacactttctaatattgataagtcgctcaatggtgaatacaatctcacatatcaaacacccgatggaccggtttctgttaggaccaaagcggttgtcatgactgtcccttcatacattgcaagtagcctgcttcgtccgctctcagatgttgctgcagattctcttctaaatttactatcctccagtcgcagcagtgtccctt

SEQ ID NO: 2 - DNA, 487 bp, Amaranthus albus
taggaccttgatcttgagctacattggaggtgctacaaatcttggcatattacaaaagagtgaagatgaacttgcggagacagttgataaggatctcagaaaaattctgataaatccaaatgcgaaaggcagccgtgttctgggagtgagagtatggccaaaggcaatcccccaatttttagttggtcactttgatctgctagatgctgcaaaagctgctttggcaaatgctgggctaaaggggttgtttcttggtggtaattatgtatcaggtgttgccttggggaggtgtatagagggtgcttatgactctgcatctcaggtagtggatttcctctcacagtacaaagacaagtagtcagtagggctccagcatcctggttaagtaactttttgtagctgttgtaattcagatataaaatagcccacagtcaaacaagtttggaaagatgtaaaagcatgagatacagtcggtgttcattgagag

SEQ ID NO: 3 - DNA, 1847 bp, Amaranthus graecizans
gtgcgagagagatgagtgcgatggcgttatcgagcagcattctacaatgtccgccgcactccgacatctcgttccgcttttttgctcatacacgaacccactcccccatcttcttcagaagaccacgaaaattatcatatatccattgttccacaagctcaagctcaactgccaattaccagaacacgattacgagccaaggagaaggagaaaaagtattagattgtgtaattgttggagctggtatcagtggactttgcattgctcaggctctttctaccaaacacattcaatccaatctcaatttcattgtcactgaagctaaacatcgtgttggaggtaatatcactaccatggagtccgatggctatatctgggaagagggtcctaatagtttccaaccctccgatcctgtgcttactatggcggttgacagtggattgaaagacgatttggtcttgggagatcctaatgcccctcgtttcgtgctgtggaatggtaaattaaggcctgttccttccaagcctacggaccttcccttttttgatctcatgagctttcctggtaagattagggctggtcttggtgcacttggtcttcgtcctcctcctcctccttcttcttatgaggaatccgttgaagaatttgtgcgccgtaatctcggcgatgaggtcttcgaacgcttgattgaacccttttgttctggtgtctatgctggtgatcctgcaaagttgagtatgaaagctgcatttggaaaggtctggaccttagagcaaaagggtggtagtatcatcgccggtacactcaaaactattcaggaaaggaagaataatcctccaccccctcgagacccccgccttcctaaacctaagggccagactgttggatcctttaggaaaggactcattatgttacctaccgccattgctgctaggcttggcagtaaagtcaaactatcgtggacactttctaatattgataagtcgctcaatggtgaatacaatctcacatatcaaacacccgatggaccggtttctgttaggaccaaagcggttgtcatgactgtcccttcatacattgcaagtagcctgcttcgtccgctctcagatgttgctgcagattctctttctaaattttactatcctccagtcgcagcagtgtccctttcttatcccaaagaagcaattagaccagaatgcttgatcgatggagaactaaaaggattcgggcaattgcatccccgcagccagggtgtggaaaccttgggaacaatttatagttcatctcttttccctggtcgagcaccacccggtaggaccttgatcttgagctacattggaggtgctacaaatcttggcatattacaaaagagtgaagatgaacttgcggagacagttgataaggatctcagaaaaattctgataaatccaaatgcgaaaggcagccgtgttctgggagtgagagtatggccaaaggcaatcccccaatttttagttggtcactttgatctgctagatgctgcaaaagctgctttggcaaatgctgggctaaaggggttgtttcttggtggtaattatgtatcaggtgttgccttggggaggtgtatagagggtgcttatgactctgcatctcaggtagtggatttcctctcacagtacaaagacaagtagtcagtagggctccagcatcctggttaagtaactttttgtagctgttgtaattcagatataaaatagcccacagtcaaacaagtttggaaagatgtaaaagcatgagatacagtcggtgttcattgagaggatagatgcaaataacttggacggaaaagtactagttccccattgttt

SEQ ID NO: 4 - DNA, 1170 bp, Amaranthus hybridus
gaagctaaacatcgtgttggaggtaatatcactaccatggagtccgatggctatatctgggaagagggtcctaatagtttccaaccctctgatcctgtgcttactatggcggttgacagtggattgaaagacgatttggtcttgggagatcctaatgcccctcgtttcgtgctctggaatggtaaattaaggcctgttccttccaaacctacggaccttcccttttttgatctcatgagctttcctggtaagattagggctggtcttggtgcacttggtcttcgtcgtcctcctcctccttcttcttatgaggaatctgttgaagaatttgtgcgccgtaatctcggcgatgaggtcttcgaacgcttgatcgaacccttttgttctggtgtgtatgctggtgatcctacaaagttgagtatgaaagctgcatttggaaaggtctggaccttagagcaaaagggtggtagtatcatcgccggtacactcaaaactattcaggaaaggaagaataatcctccaccccctcgagacccccgccttcctaaacctaagggccagactgttggatcctttaggaaagggctcattatgttacctaccgccattgctgctaggcttggcagtaaagtcaaactatcgtggacactttctaatattgataagtcgctcaatggtgaatacattctcacttatcaaacacccgatggaccggtttctgttaggaccaaagcggttgtcatgactgtcccttcatacattgcaagtagcctgcttcgtccgctctcagatgttgctgcagattctctttctaagttttactatccaccagtcgcagcagtgtccctttcttatcccaaagaagcaattagaccagaatgcttgatcgatggagaactaaaaggattcgggcaattgcatccccgcagccagggtgtggaaaccttgggaacaatttatagttcatctcttttcccttggttcgagcaccacccggtaggaccttgatcttgagctacattggaggtgctacaaatgttggaatattacaaaagagtgaagatgaacttgcggatacagttgataaggatctcagaaaaattctgataaatccaaatgcgaaaggcagccgtgttctgggagtgagagtatggccaaaggcaatccccc

SEQ ID NO: 5 - DNA, 2344 bp, Amaranthus lividus
tagattgttgagagggaatgggcaattaagtggaatcccatttccttaaactcagctggtgtatgtaatggtgtctttccaccttcaatcatgtttgcaattctcaaacctttaacatctctaacaacctcttttagctcttctatgttggctggtgcctcaacaaatgtggcatcagcccctgcctctctgtaaagattagcacgtctaatagcttcttgaagaccgtgaggtgcacgagcatcagtccttgcaaccaagaagaaatcagattcaccaatggcttcccttgctgcagcgatcttaagggcgtgctcctctgcaggaacaactgccttaccacgcatgtgaccacacttctttggccatacttgatcctcaaggaaaacacccttggcaccagctgcgatcaagtctttgatgaacctttgaacattaagaggaccaccaccaccggtgtctccgtcaacaataacacacaaactaggagcagctgccgtaattctgcgaacaacatctaccacttctgcagttgtaagcaagccaaagtcgggcaagccaagaagagcagcggaaacaccaaaaccggagacaaagcaagctttgaagccggttttagcgcaaatggcggcggagaaagcgtcttggattccgggcattaaaattggtccctcctcggcgatcagacggtgcattgtggtctttccgactgcctcaagagaacccatttttgtttctaataatacaatttaggaattaaggaaggaggtgatgatgagttgatagaactacttagtgtgtaattgttggagctggtatcagtggactttgcattgcgcaggctctttctaccaaacacattcaatccaatctcaatttcattgtcactgaagctaaacatcgtgttggaggtaatattactaccatggagtccgatggctatatctgggaagagggtcctaatagtttccaaccctctgatcctgtgcttactatggcggttgacagtggattgaaagacgatttggttttgggagatcctgatgcccctcgtttcgtgctctggaatggtaaattaaggcctgttccttctaaacctacggaccttcccttttttgatctcatgagctttcctggtaagattagggctggtcttggtgcacttggtcttcgtcctcctcctcctcctccttcttatgaggaatctgttgaagaatttgtgcgccgtaatctcggcgatgaggtcttcgaacgcttaatcgaacccttttgttctggtgtgtatgctggtgatcctacaaagttgagtatgaaagctgcatttggaaaggtctggaccttagagcaaaagggtggtagtatcatcgccggtacactcaaatctattcaggaaaggaagaataatcctccaccccctcgagacccccgccttcctaaacctaagggccagactgttggatcctttaggaaagggctcattatgttacctaccgccattgctgctaggcttggcagtaaagtcaaactatcgtggacactttctaatattgataagtcgctcaatggtgaatacaatctcacttatcaaacacccgatggaccggtttctgttaggaccaaagcggttgtcatgactgtaccttcatacattgcaagtagcctgcttcgtccactctcagatgttgctgcagattctctttctaagttttactatccaccagtcgcagcagtgtccctttcttatcccaaggaagcaattagaccagaatgcttgatcgatggagaactaaaaggattcgggcaattgcatccccgcagccagggtgtggaaaccttgggaacaatttatagttcatctcttttccctggtcgagcaccacccggtaggaccttgatcttgagctacattggaggtgctacaaatgttggaatattacaaaagagtgaagatgaacttgcggagacagttgataaggatctcagaaaaattctgataaatccaaatgcgaaaggcagccgtgttctgggagtgagagtatggccaaaggcaatcccccaatttttagttggtcactttgatctgctagatgctgcaaaagctggtttggcaaatgctgggctaaaggggttgtttcttggtggtaattatgtatcaggtgttgccttggggaggtgtatagagggtgcttatgactctgcatctcaggtagtggatttcctctcacagtacaaagacaagtagtcaatagggctccaccttcctggttaactaactttttgtagctgttgtaatttgtatcatgtaatattattcagatgtaaaagcatgagatacagtcggtat

SEQ ID NO: 6 - DNA, 1866 bp, Amaranthus palmeri
aatccttgatttgaagataggataaccagagagagtgcaagagagatgagtgccatggcgttatcgagcagcattctacaatgtccgccgcactccgacatctctttccgcttttctgcttatacaccaacccgctcccccatcttcttcggaagacctcgaaaattatcatatatccattgttccacaagctcaagctcaactgccaattaccagaacacgattacgacccaaggagaaggagataaagtattggattgtgtaattgttggagctggtatcagtggactttgcattgctcaggctctttctaccaaacacattcaatccaatctcaatttcattgtcactgaagctaaaaatcgtgttggaggtaatatcactaccatggagtccgatggctatatctgggaagagggtcctaatagtttccaaccctccgatcctgtgcttactatggcggttgacagtggattgaaagatgatttggtcttgggagatcctaatgctcctcgttttgtgctctggaatggtaaattaaggcctgttccttccaaacctacggaccttcccttttttgatctcatgagctttcctggtaagattagggctggtcttggtgcacttggtcttcgtccttctcctcctcctccttcttatgaggaatctgttgaagaatttgtgcgccgtaatctcggcgatgaggtcttcgaacgcttgatcgaacccttttgttctggtgtgtatgctggtgatccttcaaagttgagtatgaaagctgcatttggaaaggtctggaccttagagcaaaagggtggtagtatcatcgccggtacactcaaaactattcaggaaaggaagaataatcctccaccgcctcgagacccccgccttcctaaacctaagggccagactgttggatcctttaggaaagggctcattatgttacctaccgccattgctgctaggcttggcagtaaagtcaaactatcgtggacactttctaatattgataagtcgctcaatggtgaatacaatctcacttatcaaacacccgatggaccggtttctgttaggaccaaagcggttgtcatgactgtcccttcatacattgcaagtagcctgcttcgtccgctctcatgatgttgctgcagattctctttctaaattttactatccaccagtcgcagcagtgtccctttcttatcccaaagaagcaattagaccagaatgcttgatcgatggagaactaaaaggattcgggcaattgcatcccgcagccagggtgtggaaaccttgggaacaatttatagttcatctcttttccctggtcgagcaccacctggtaggaccttgatcttgagctacattggaggtgctacaaatgttggcatattacaaaagagtgaagatgaacttgcggagacagttgataaggatctcagaaaaattctgataaatccaaatgcgaaaggcagccgtgttctgggagtgagagtatggccaaaggcaatcccccaatttttagtaggtcattttgatctgctagatgctgcaaaagcgggtttggcaaatgctggactaaaggggttgtttcttggtggtaattatgtatcaggtgttgccttggggaggtgtatagagggtgcttatgactctgcatctcaggttgtggatttcctctcacagtacaaagacaagtagtcatcctgattaactaactttttgtagctgttgtaatttgtatcatgtaatattattatttattcagatgtaaaagcatgatatacagtcggtgttctttgagaggatagatgcaaataacttggacggtaaagtactagttcctgtctcttatacacatct

SEQ ID NO: 7 - DNA, 1066 bp, Amaranthus palmeri
catgtggtggagatcctcaatcgctatctatgcaccatacatttcccgacgtatggaatgttgaaaaaaggtttggctctgtgtttgctggactaattcaatcaacattgttatctaagaaggaaaagggtggagggaaaatgcttctatcaagaagcctcgtgtacgcggttcattttcattccatggtggaatgcagacacttgttgacacaatgtgcaaacagcttggtgaagatgaactcaagctccagtgtgaggtgctgtccttgtcatacaaccagaaggggatcccttcattagggaattggtcagtctcttctatgtcaaataataccagtgaagatcaatcttatgatgctgtggttgtcactgctccaattcgcaatgtcaaagaaatgaagattatgaaatttggaaatccattttcacttgactttattccagaggtgacttacgtacccctttccgttatgattactgcattcaagaaggataaagtgaagagacctctcgagggcttcggagttcttatcccgtctaaagagcaacataatggactgaagactcttggtactttattttcgtctatgatgtttcctgatcgtgctccatctgatatgtgtctttttaccacatttgtcggaggaagcagaaatagaaaacttgcaaacgcttcaacggatgaattgaagcaaatagtttcttctgaccttcagcagctgttgggcactgaggacgaaccttcatttgtcaatcatctcttttggagcaatgcattcccgttgtatgggcacaattacgattctgttttgacagcaatagacaagatggaaaaggatcttcctggattttttatgcaggtaaccataagggtggactttcagtaggaaaagcgatggcctccggatgcaaggctgcggaacttgtaatatcctatctggactctcatttatatgtgaagatggatgagaagaccgcgtaatctttctgaaattccttcactgtaaccaagcgtgtgaagcccctgattttgcgtctgtatatccgatgatatatcgctggat

SEQ ID NO: 8 - DNA, 294 bp, Amaranthus palmeri
ggggagcgggttgctggataaccagagagagtgcaagagagatgagtgccatggcgttatcgagcagcattctacaatgtccgccgcactccgacatctctttccgcttttctgcttatacaccaacccgctcccccatcttcttcggaagacctcgaaaattatcatatatccattgttccacaagctcaagctcaactgccaattaccagaacacgattacgacccaaggagaaggagataaagtattggattgtgtaattgttggagctggtatcagtggactttgcattg

SEQ ID NO: 9 - DNA, 6448 bp, Amaranthus palmeri
ggtgtttatttgggcatggccttatgtgtgatgttggtaaattttgtggcttcgtccactaatctgatgtatcggatctgttaaagggagccctctcatcctatgcttatcaatgactttttcatatgcctatcaaacagatcagattggatcgggttcgagttcaggtcatatataaacatgtcagcaaacccttgacccatacccaacccatttagttaattggcttgaaaatcacaaccttaattcgaccagcgacagatcaggttgacctgatttcgacccacttaacccatttataatttttttttcgatttaagttttttaacattgattaaatctaattttttaggctttaattttaattttatgtttttttgtttaatttgtatttactatgaaaaataagaaactattatatgaactgagtttagcttacacttattaatttaactcgaaattaacacatttaattaaatggttatatagggttttttagttttaaaatttcaacctgaacctaatctatttaataaaaagatcagatctgatcaacccatataattaattgggtcaaaatctcaactcaaacccatttatttcgaattaaattcagatcaaattagcaggtcggatcaactagcgctaatttttcctctcaagttttttcatatgatgccccttgttttctttgaataaaattcaccaatttaaaatccctgcccttgatccgttggtattggtatttggtaaagcacatatggtaaattctactccattgttatctgtagttttggttctaaaccccaaacaaatcctactcctagcaccactaatcctcattactttctgtttgctgtctttctctacattcctactaaattaagacctagatgcagtgttattctgttcgaggttgccgaaaacggtacaatagttgcctaatttgcaattcatgtttgttcttgcgttttctacattgtttactctattggaacaaaggttgaactttcagcctttcagggagtattttgatttttctgtcaaattaccttgccagatttatttggctattttgattgtgtgtatttctttgtcccttgtttccatggggctaaactccttttggttaatcttaaacatttcttctaattttgaattgcagtggtatgaagtgttgtttaatatacaatcaatttttctgaactgggttaatgaagagaagcattgtagacatgaggaatgtgttcaagcatctcaaaacaaccaaattaatcccaaatgggatcttcaactgtaatagaggtaaatcacatatattctcatttaatggttattgttttattttaaggatgttattatgttgttatcaatgatagaaataagagaagcttgagcattcaaatgtatctatcactcactggttgtggacatctaaaatatggaccaagagttttcttcatttcttgtaccagaatttgcaaatgtatgattaaagtttaggttggagttgcaataaaatttcattaccccgacgctattaagtggctcacactgaggcggggtttgagggtcggatggtgcaaccttcaggagaggttctaagcattttcaacatgttcaaccgcagagggtcccgtaaaattggaggcttcaatattaaattatgtagtatgtgttaagtgtttaaagatataaaaatgttaatgaatacataatttttaaaattgcacagggctttcaaagaaatttttgattttgctccgcccatggcaacctttggcaaatctggatagaattagagaaatttacttttatgtatgtataatctgatgaatgaatgaatgaacaatgaagttcatttctgagtcaatgacctatatactatcgaggtttcgttaaataggatatataaataaaattagagacatcttttatccctaatgttgtctgttttcttttctgggcgagactgtttttggagaaaaacgttatgttgaatgcttgatttactcagaactgatgcaaacagatggataaaaaatggtgttttcctagtgtttatgtttcataaaaggatttcaaattccaatcgtatgaagtttgaaatactgctttttgtttttgtagcttcgtgttttgctttccttcactcttcaccagggaacgttgttgaagtttgttccaagaagcaagaagtcgtaattgcaatcgggagcaatgttggtgacagattagaaaatttcaaccaagctctgcaacaaatgaagaaattaggcatagacatcacaaggcatggttgtttatatgagacggaacctgcatacgtgactgatcaaccgaagtttcttaactctgctttaagaggctttacaagacttggacctcatgaattattaggggtattgaagaaaattgagaaggatatgggtagaaccaagggaataaggtatggtcctaggccaattgacttggacatactattttatgggaagtttagggtgagctctgagagcctcactatcccccatgaaaggatatgggaaagaccatttgtgatggcaccattgattgattgtattgggtctgatgtagaaaatgacactatttgtacgtggcattcattatcaaatttttcgggtggaatctttgaagcatggggtaaactcggtggaagctccctaatcgggaaggatggaatgaaaagggttttgcccgttggaaatctcttatgggattggtctcataaaacctctgttatgggagtcttgaacttgactcctgatagctttagtgatggcggaagttttcaatctgtcaatactgcggttgctaaggttcgtcagatgatctcagatggggcagatataattgacatcggggcacaatcaaccagacccatggcaactagaatttcggctgaagaagagctagcaagagtagtacctgtattagaagctgtcaaggatttgatcgaggaagaaggaagaatcttgtcagtggatacgttttattctaaagttgctttggaggccgtcaagaagggggcacacattgtgaatgatgtctctagtggtaaactcgattccgagatgtttaatgttgttgcggaccttaaagttccttatatagcaatgcacatgcgaggagatccgacttcaatgcaaaactctgagaacttgacctacaatgatgtttgtaagcaagtggcttcggagttgagttctagggtcatagatgcagaattatcgggaattcctgcttggaggatagttattgatcccggcatcggattttctaagaatacgaatcaaaatttggaaattcttagtggtttacaaaagatacgggaagagatagctaagaagagtttggcggtggctcattgccccttgctaattggaccttcaagaaagaggtttctgggcgagatttgtgagcgccctgtagcagctgacagggatcctgctaccattgcttctataactgctggagttttaggtggtgcaaacattgtaagagtacataatgttagggataaccttgatgctgtcaagttatgtgatgccatactcggaaaaactgattaactgcttgtttgtaccaccttgtgaatgatgtctagtggaaggttcgattgggattatgatgaagtccgttagtttgctcgaaagaagagctttagcccgtaaggttatagttcttacagatgtagaatcattggctatttgcctatttctgcttagaagatcatagcattgatccagactttggattccatgtagaattatgttgcgactcatggtcgaattggccctttgaggaattgttgaagttccttgagtctatggttcaatcggctcggttcgatgaaggttggactgtgtcgagacaagatgggtcaaagagaccaatggacaagaagtcgaccttgggcaagcttgatcaagttacttggacgagcagataacagcaggctctggcgagcattagacatacatatcatttgttttttgaagtcagatctgcaatcaatcagttgcaatggacagaccatatacggttgttagttgttcctgtcactctttgagttgaattagatcatgcaaacactgtaagagtcttgattttgtgaagctatgtgatactgtacttctcaaaatgaaatctttgatatgatgttagcttcaagagttgtttttccccccctcacattctgttctatgttgtattgttgtgtgctttttggaattgtattcctgtaattagaattattcctgcaaaatggtattcctttatatcatcaaaggagtttttgtacttctaatcattgatctttagatgcaaaactgaattaatacaagtgttcttgatgaaggcttattgaagaactcactttttatttatgtctaaacttgttaaagatgttctgcttccgcccttgccacgggatgtcgggattgactaagggtggtaatcgagggattcctatgcttgaattgactcgtttaagattttgcgttgattttaagtcaaatgttttgctaagcataaactattctagctcgacttgaataatgaagttttcgagtcaagtccgagctgttctgtaagtttatgtatcttgaagcttcttagttcttacttcttatccttatttgtttgacacattgaaccgcgttgatgcttgcttgactcaacccgttaaagtcttgaattcatcacgaattcgagtcgagcaagtttaaacccaacattaactaagctctcgaggcttaatgaggcaggggtagctcaagtttgttattcaagcaacttaccatagtattcttttaaaaggcatatagtcagttagttatttgttaatttcagtagaacgaaagaagtacattattaaacttggccattgatgcttgagctagagagcttcggttgtgatcgaaacgaatcctgatttcgctcttgatctttgatgtgaagtgacaaggccttcataaaactcctttattcttcagcagtgcatacaaaaatcatgtgtgcccagctcctagctcacataccgcgtttttcccctaatctagtgtggtcaaataaaaacagcaagatgtgttgatgtcatgtgcaatagtaattatcaggtgaagtaatgcaatatgtagccagtcacctcatatcaaaaaaatgttgggaggaaaacgtattcgttcatcactaaacctgtgtttatacatctaactgatcgatcagggtttcaaaatccaaattaatacaatggcatttgacgaagatatccagaacacatcccccttgtttctgctagataatcaactattctgattctgctgtaatacctcagcttcggccctagccatgggatcgtcctctttttctccttcacgctcctcggccagtttctttctgtgcagttcttcagcagcttctattgaagctttgttctcggcctgaagacgctgcatttcctcttccatttgctgcctctcaaaccatgtatcagcatccgcccaaactgcagacaagtatacaaaagttaaataacgaaagtcttcaaaactgcagatccagtgaacaaagtcattgttgccaatgcccatgcaaaccgcaaaacagcagggcaaaagaacacaacattgcagcataaagagcaagttcagtgatctacagttactacaaaatttaggtttgggataccagcatgtcaatatgaatgaatttgctaatacatgtaacccaagaactataagtctataactaacaattaagaaaagaaaaccagaagttccctaccactggagtattagcaaggtaacgactgcctgctgataagaattattggcctggaagtctggaactatgtgatgatcaacatgtgttgctattctaggtaaaactaatctatcataatataattaaactacaggccccagaattggggtcctgagctattgatcatgctgttaaagcaaaagagttgggctgaatgagactagcaattaaaagcataggatacactgaacaatgcttccccctccccatccaaacacgtaggttttagttacacaatagtggcttgagctagaaaaccataaggatatcatagtggacacatcatagttaagttttacataaatataccttatacatgtataagcaatacatttccaggttgataggtcagttttatgtctatattgatcgccattctattatgagggaattatattccaataatgggtaatcatcaatgagcagtatttataggaatttattgatagcgtttctattattaggatatagaaattccaataataggtaatcatcagtgagcagtaattgacttatcagactctctggcagcatagtgacaacatgctgtttgtgaaaaggggataaccatgattttgtcttttctttgcaaatgaagctcttt

SEQ ID NO: 10 - DNA, 5240 bp, Amaranthus palmeri
attatatgtcatgtaatataaatagaaaattattatttaaataattaatttcaaactttgtatcaataaaacacttaattttttgattattagagtgtatatgaaaaatatgtaaaaaaaagtcgtacataagaaaatttcattgtaattaagactaaatttgatgaatcgattcgtaaaattgctctatgatcctacaacccacttatttatttcaattaggactgtaattaagtttaaatttacattagttgaattattgccttttatgagagatgtggtatcgtatgctatctaaaggctaaaactattaagtcgatttaaaatctatccaaattttatacttaattgaactaggttgaattgaacggagaattaatcaaaaatgtaccacccttgaatcactatcaatattaaagcaaaccaactttaatccataaatgaaaatcaacttagtcaaatcacatatgaacccgtcaatcatgccaaaaactctgagagtgtttgatattataacttattagaaaattttaacttatttgacgcaaatagacggataagtgttctaaccatctagctctagtgtttcgcttaataaaaataaataatttttaaacatgctcctataaatcaactgatcaaaccggtttataaaatcaccaactaaatcgacccattcaaatcaaataccaactcggtcgtttgccaaacacttcgctatgacttcaatcaaacaaaatgcaacttgtttgctgctaccgacttaccgccttacccagtacgcggaaaagataatcaatgagaatcaaattcaaatcttgacaagataatatgattatcccattattatcaatttaattatgattaaccttttttaagataacctaataattcattgataagaatgattagcttgtttaatcaacttcaatttacaatttctaccttggaaaattcaaaccaaaaagtgtaaaagaattgatttggcagattgcgacaattggattgagaaattgacaaatttaaactgatcttatggtaattcaatccataacccacctttcaccaaaacttgcattgccatcgccattgtcaatttccgccaagaactacccagtagctgtaatgggcaacatttctgagcgggaagaacccagtaagtcaacctttcttcatatatcttaagcaatcccttttgaactacactttcttttgatgattttacattctgaattgtttttattggggattttcagcttctgcgaaaagggttgctgttgttggtgctggagttaggtaaattttatgttacttttccagaaagattgtgaaattttgctttgattgttctgaattttgatgggtttttgcataatgatttgtatttgggatgggcaaatttttcagaagatcatactactttttaacttgtgttttctgtagaattttattgattttctaaactgtttttgtgggattgttctagtggacttgctgctgcatataagctaaaatcccatggtttgagtgtgacattgtttgaagctgattctagagctggaggcaagcttaaaactgttaaaaaagatggttttatttgggatgagggggcaaatactatggtaatgtttatcaacaatgctggttttctgatatagaaccaattacttatttattaactggatttttggtcaaacctgtggttggcatgtcactttatgctatgattgtagacagaaagtgaggcagaggtgtcgagtttgatcgatgatcttgggcttcgtgagaagcaacagttggtaagttttccgtctaagcccattccctttgctctctaggtgcaaaaatacggtaatagtcatgatcgtggtaatgacatggtgatgcggtgacgggagttatgtgatcgctattccaactataggtcgaaaacatgatattttccttgtgacgttccgaaatgcggtatttttacacctttacattgcggggaaaaataggtttagtttttttgaatacctttacaaggcggctgatgcgatgaagccttgtttttgcattatgtgctagaagcaaattattatatctttaattaatgtaatgtatcatcagcttaaaacagccttattgtacttcttaatctagttttgacttttgaggttgcttttacgagatccttataaattgctttttctgtcacagccaatttcacaaaataaaaggtacatagctagagatggtcttccggtgctagtaagtcctctgcattttcttttgacctctatgaacttctaacactggatactgagttgtatttgtattcgaggcaaattctatattttccaatctgtttcttattgacagttacttgcaacctttgcagctaccttcaaatcccgctgcactgctcacgagcaatttcctttcagcaaaatcaaaggttatttatgctaaaacatgtttgtttgtttttttttaacttagcttttggtgtatgcaataatttggtttctaaaactaagtgattgaccgaaaaggagggacaaaggacatagaattgcaaatttttgttcttgacgtatttttacttttagagcatccccttgtgtaaaacttttattttagagctgcaagaatttgttgcatcttttgttatgatttaattttgatgcttttagctgcaacagtttgttgataaaaaggccactgcttttttctcagctgcaaattatgttggaaccatttctctggaaaaaacgcaatgctactgagctttctgatgagcatgttcaggaaaggcaagtgcccttgctctatctatactgatggaaaggattatcgctgaatttaccttctactgaaacatcaataaaatacttcattattagcatcaaaatactccctccatccttctggttttgctggactttccctatgaaggtgttcaaggagtagcttgctacctttcaagatagggtagtggttgccttctcgcaaaatttcagtcactcgttttcctctcctaattcaagccatactttttatggttcctccacacaactcttgctaaatttgaaaagtagcaaagaggaagtgagcaaaatcagcaggagtaggactgatgagtaagagcttgatcaagtataaaggatatgtttctatgtagaatatgaatgcattacctgtagaattgacataatgatttgtctgcagtgttggcgaattttttgagcgacattttgggaaagaggtattgttgccaacttgccatgctctattccggtgaattaacaaatgttgcgcttctgcttactattgcttataattattgtttttttgcagtttgttgattatgttattgacccttttgttgcgggtacatgtggtggagatcctcaatcgctatctgtaagttaaatactgtgccttctttttttttctcaaaattttctggaggttgtaaataaattatactccctcctattataatcaactgtcctatttccccttttggtatattcaaagtgagttaaatattgccatccattaaatttcactttgtcccttacttattttttcccttactcactcctctcatgtggtcccttaaactcggtgcattaccaaataggactattgattgaaataggagggagtatccgattgtgcttccaaaggtagttcaactcctcttctttttctttaaatttttgtaccatactgtgcattttgaaccttaactcatttcgccatgaaggagtattatatttgagaagaacgcagatactattatcttatacattaggtttcattatcaatgattgtttgattgtcaactcctcttttccctttcatgctcatattgatgttatttctatttggttatgaattttgtgtattgtgttaatgtcttactttattgtagatgcaccatacatttcccgacgtatggaatgttgaaaaaaggtatgaatcttaaagctttaattttcttcgaacgttatgtttcataattgattctttgggatcaatttccgtaagaacgataatttgaaaaaatttatgaaccttcaagctttcttcgaatttatatgctttgtaattcatgcttttagatgctgcaccattttatctatgtgtcttaagtttggtgtaatcatttgtatagcaaaagaatgaatggtctggtttgaaatggttcatagtgcaaaatgtgattgtgcttgcgattgaggtaacattcaaggtgatgcgattgtcgtactgtcaattgtcgtcctataccatgtgatatttgaataagcctaaaatgccatattgtacacctttaggatgtggacaaaatgggttcggtttcggtacatatgacaaatccttgcaatttgatctgtacgatacaatgcgattttgtcttttgctttatgatggtgattccatatgcgattttagggcttagaaatttcccttgttcaagaacatctcaatcaatctttaaccaatttcaaccacattaaattgcgtcaaagtcgaactttataattcactcccaatctctgagatatccaaactccaaaagttctattggctttcatgttttcacaaagtaacgttggtgggactccttaccattttctttattatgcatttcgttgatgtataatagtatagattggtgctcttttcgctgtccttctaacatgcataacttcactagttcttatcgttttcttttcctccctatttttatttgacttgtagctatctatgttcactcttctcgcccaatccaatgttatcttctactccatgcttgcaaaagccacaaaatgctcactccaccaataagaggaaattgccagtccaccacttgctggaggcatccatggaagctgaagtatttttgtcctctactcataggatgcatacatgcatcgatttactttctaatactcctttaacttgattccgattagctctgctcttaacaggtgttgctagaaaacatcaactattttcagcataaattaaatgtgagcattacctaataacgtgaaaactatcaaatcttgtttgtagtgcaatattgcgttttcggttgcggttgcatttacgatcgcaaagcgaatttcttggtcaatgtggatcgttctgcacttgcctacattccatcataataagctcaaatttgtttcattgtattttcgtaacaagaacaaaattattgtgtaattcttccctca

SEQ ID NO: 11 - DNA, 2936 bp, Amaranthus palmeri
tcagatatgtcttcataaagtattcaagtttgagcatgaaaatccacatgtacatgacatgagtatgcaaatgcaagtaatacaaacacataggcaaaagagatgatgtaatcactattcggtaatcgctcgcgcacaaatagtagctcactatatgaatgagatgagaaaatttcaattgttgtaaaggcgagttccttatgttttagtccaacagtgttttgtaacctttgtgtaattttttatatgaagcacaagagcaggtctcaaataagtacaggagataaatgaaactagaaataaaagtgttcaatatacttggacatagtcacatagttaatgccaaaatccatctttctgataagttggggccacttatacactatactaacatgagcctggaaagaaatagccagcaggaccgcaggtatagattgttagctaggaaaaccacaaaaccatactccctccatattaaaatgacattaacaagtgattagtaatgtaataacctacttacatattctaacaagtgattaatttcaatagtattccgacaaaatgtagctttaataattatcttccatctcatcaaatttgtttgggaaatttgtaacactgatcaatgactctagcacaaggaatagctaaaattatcatcatcatcatgatcatcttgactagtgtatcccactcataaggaaactatgatcagggtctggaaagggaaggaaggcgacaaatcataccataaagggagtttagaggtaatgaatacctaaatcctgatcctaaaacaattgatcttccccattaccacgccaatatcaacccacaaagcatccggggaaagtcaaacaaagggaaaaatcacaattgaaatatcctagtttcaagtttcaaccaattgggtaccatttacccatgttcaagtgtagcaaaaaccctaatatagcatcttaatacagctccagtaaacattatgcagtcttaatctgaagctactataccaaaacgactaacatttaacaaatgccattccaccattaaaaaaaagggtgttttagcggtaatgagttgatcggtcaatgtcaatccgagtaagaaaaaattaacacaatgcaaacccatttgccatgtttcaacacacaaacacaaaacactgataattccacaaatctgatactacaagcagcacaacagtcaattgcaaacataaccaaaaaaagctaaataaacagcagaacctgggatcggaaaagggtggtcggcgtcgtgaacaaactagagagagaaagatgaatatagagagataaaggagtgagaaagaaggaaggagagtaagcagaatgaaatgggtagtgtggagtgtggaataatggttgaaaatgaagtgtggctcttccatagaggatagggatgctgaaattgagtggtgaataaacaatctgaacaagatttggagaatgcaaaagaatctctggactaaattaatggaaaatcaaattgtatgtaatgatttagatatttaattagggttcttgtttgtgtctactcattctgtcactcacatgcatgctcattgtttgtatcaatctaaagccaagcattgactttttgggaaagccaaatagagaaaacaatatcctaaaggggaaatggactcataaaacgtgattgttactcccacctacagatgttcattcgggtcatcgagttgatttagggtcaggtgtttcgggtaggttcaaaatcgggttttgtgttcacattgatttttacatgattttaaattcatattgacgtcgggtcaagtcggattagattattaactcgggtaaatatcggatcatcgggtctgttttgaacacctctagtattttccaagttttgttgtatcacacatgcttgttgtggatgacctaaaattctttactgctgaaacgggacattctgtgttgcgttacatttggtttttagtagaatataagtttcggtgggttgttaaggcaaaaaacaagcagatgagaagaaatgtgtggctgagatgaatagagagatttttgcggatagaactaggaaagggcacgtgggttcatatccgtaagtaaaaagttagcatataactatagaacaccgaaaaatgaaaaatgtagcgaattgataagtgatcatatgcaatataaagttctggtgttttctgatatattcttttgtgactaaattgaacgggaaaccatcaaaaataatcgtctgtcaaggtattgaaaatcctaacttgggctatcggtgtaggtaaccataagggtggactttcagtgggaaaagcgatggcctccggatgcaaggctgcggaacttgtaatatcctatctggactctcatttatatgtgaagatggatgagaagaccgtgtaattcttctctgggaacgtcccctgattttgcgtctgtatatccgatgatatgtcgttggattgatcacgattgtagtcacgtttaggagttgtgcagtgacttttctgcctaaagactggatctgttagaaacaaatagtctatagatagtttctttgctcatcaggttatctttcttacaccagttgtgtatacaaatgttgcatagcctaacctaaattctaaaatgccattcccttttatatagggtcatgttttttgcatttatgaatggtgaaattttagatcttcactgagaataaaggttttggcaatttcataatggtgcttattaggggtatttaaaaccggatattggcaattttcattgataatattgtaatggaaaaatgacgttaaatatctttttcggtttacgtatcgaaaaatagacaaaaaggtacttgtttcgaccagatttacaaaagagttatcccattaggttaatcacgacgtccgtttttttgaaaaaaaatcgtta

SEQ ID NO: 12 - DNA, 1923 bp, Amaranthus palmeri
taaaaatgacgttaaatatattttatttttattttgttaatttatgtgttttaattataaagtattaaaaaatacgatgattaataagatactgctacatagacaacttaacctctcaaattggtcaaacccttaaacttaacggttaactaacgttttccattaagtgatagtcatttgcagagatttatattagattaggtagttttttgcaaaaaaaaaaattacattaggtagttttttgcaaatagacctatagattaggcagtttcttataatttttccttcttattatttgttgtttcagatatggcttcaagaatgaagtttggtaaccaaacttttcaaatttgaagtgagggttggagctctggtgttggaagccttttttgtaacaccccaaaaattttaggcaaactttatacgtttgtttatccaaaaaaaaaataataaataaataaaaaaaaaaaaattcttaaagtagaaccacttaagggtcggaggtctaggtaataattttggagtgataaatgtaaagattgaagagtttgtaactcataccattagttcactcatttacctcaatttatgattataattaagtattacaaaaaaaaggggaaacaatcacttcatattccaaaggtgaagcttttaatagtgaaggaaaaggatttcttaagcaatacagtattaaacgtaaactaaaaaaaataataaatcatatcttaattttgagaagttttattcttaatttgtttatccctatcaatactaagcttgggataataaacaaagggttatcaaggttggaggatttttaatttcgagattatatacttgaattgaagaaattttatgttcaagagaattatattagaggaatatttgtaaggctattatctacaattcttcatatttctctaattgaaatatatataaaggtaactagtttaccctctcttttcttaattcatatacattgttattttttttattatatggaaaatataaaacggaaaaaaaaatgtaaattaaacttatcttagttttgagataattgatgttatatagtcttataatgttgattaacgttgaaaattgaattacaaaactaaataatttaaacatatgatttgttaacttctactaattaaatcttggttaggggtgatttagttgatttgagaaatatccaaataaataattagattagtttggtgaaataatatttttttttgacttcgaaaacaatgggttaatttggcacactaatttggaatgtacaaataagttcattagagtagagcttcttaaattatgttttggtatagttaaaagtgatgttaatgtatggttaatattttataaatattttatatattttgtttagttgaattggccacttaatgaatttgtacattgctgttaaaaaaaaagagaggatattaatcgtttggtacaacagcataattgagcaaatcataaatctgccaaaattcaagtaattaaaaataattatcaattaacagttatacaagtgtatgtatgtggcattagcctaattgattgcgcaaggactaaataattacttattcaggtaatttagtattttatccaggttaattagaggttagttgagttgattatgatcaatattttggttaaatataaattttggcaaagaaaaatgagtattaatattgtatttattttgagactcgacaatttttagttgaattgttactttctaagatgttaagagtgttgttgacatagttgtacttttgagtagaataacactatcattagtacctctttgccaagagttagtaatagggttgacttttgttgacttagtcaaatttatagttgactttattcccaaactcagacattactcataacatcaattttggtatt

SEQ ID NO: 13 - DNA, 2787 bp, Amaranthus palmeri
acataaaaccgctacatggaggcacggttttgtgtcaaatgtaaaccactactccatgtagcggtttggtgcacatacttttcaactctcagtgtgttgctgacgtggacggtagtgcgggaattattttacaaagtaacgtaaagtgggaattttttttaaataagctgcattttgggcaaagactctacttttacttttaattttatttttaattttaataaagaaggaagaaaaaaaacaaatgtatttatggataaagaatccttgatttgaagataggataaccagagagagggcaagagagatgagtgccatggcgttatcgagcagcattctacaatgtctgccgcactccgacatctctttccgcttttctgcttatacaccaacccgctcccccatcttcttcggaagaccacgaaaattatcatatatccattgttccacaagctcaagctcaactgccaattaccagaacacgattacgacccaaggagaaggagataaagtattggattgtgtaattgttggagctggtatcagtggactttgcattgctcaggctctttctactaaacacattcaatccaatctcaatttcattgtcactgaagctaaaaatcgtgttggaggtaatatcactaccatggagtccgatggctatatctgggaagagggtcctaatagtttccaaccctccgatcctgtgcttactatggcggtaaactcattcttctctctttctccaatttttgatcattctattcaattttccccttattgagtcaaaatcaaattccaggttgacagtggattgaaagatgatttggtcttgggagatcctaatgctcctcgttttgtgctctggaatggtaaattaaggcctgttccttccaaacctacggaccttcccttttttgatctcatgagctttcctggtaagattagggctggtcttggtgcacttggtcttcgtccttctccccctcctccttcttatgaggaatctgttgaagagtttgtgcgccgtaatctcggcgatgaggtcttcgaacgcttgatcgaacccttttgttctggtacctaccctgtttaatttttcagttttcccccttttttctctactactcctactttattgattcttatctatgagtgttctatgggaattgacattaattgttcaggtgtgtatgctggtgatccttcaaagttgagtatgaaagctgcatttggaaaggtctggaccttagagcaaaagggtggtagtatcatcgccggtacactcaaaactattcaggaaaggaagaataatcctccaccgcctcgagacccgtccgtaatcaccattactcattgctttccttcaccttgtatcttaccttaatatacatgtatttaattgataatgtcacattgcctcatttgcagccgccttcctaaacctaagggccagactgttggatcctttaggaaagggctcattatgttacctaccgccattgctgctaggtatcttttgactctcaaatcttaaatatttctcatcttttccttctgctaatactagtatgtttaccatctttttatttttttaggcttggcagtaaagtcaaactatcgtggacactttctaatattgataagtcgctcaatggtgaatacaatctcacttatcaaacacccgatggaccggtttctgttaggaccaaagcggttgtcatgactgtcccttcatacattgcaagtagcctgcttcgtccgctctcagtgagtatcattctttccttcatttcttttcgtttattgctgtccaatgtcttgttaaacaccagtttggccttgtgctcgtgaattatggctacaatgttaactgattctgtgattcaggcactgtgggagatgcctaagtttctaaaacctctgcgcataatgtttgtttggatgttaggaattgcattgaaaaattgcttttgtgatgttgatgttaataccaattacaagtgtgttcttcaacttctgcaataccttgttcgagtgagcttgagggggtttagattagtgtccaatgtgaaactagcaaatgaactccaagcgctgggataggtccttgggatggagcccctgatacccaagacagtattcaaaccctctaagtagagtgagagatcaaggaaagaaactgggtggttcctcaaatcgtaaaaaatgaatacagtgtcatgattgctaatcttatcacaaatcgtaaaaaatgaattatggtcgattttggactatttttgggtcattttgagtgaatctcaaacttaaaaagcgagtcttctagcagttcttgttacagcggggcatacataggtaggaatttggttttttactatttgagccttttgactgttgtggccggtaatatggaatagtctagcacttctgcgtgtgtacaactagtatttattgtaattatgtgatcgcacttaactctcagataaaaccttaagcactaacattttgttttggttgaaggaatcaggaggaaagaaaattgagggatttgttggtatatagattcctttgtttggataacaaaattggagtggagagatttggaaggaagaattttatagggattagttcccattacacttatgttgattacaaaatttctccaaaagtggaaagattttgagtgaaaatgttttttatttctcttcctctccctttctttccctcttaaacaaacaaggaaagttaatcttatcattccgtaccttccccttctgttct

SEQ ID NO: 14 - DNA, 2379 bp, Amaranthus palmeri
attattgtgtaattcttccctcacgtctctattgtcttcatttttttagaaaaataaataaagcttggttttatagattttgtaactgatatgcaatacatttgcgtttgctttcagttattgattcaaaaacaataatgctaaagccctaatcctaacatgttgtgtcatctgttgaaacaatacttgaaatcgctataaaaagggatttttgtcgggtacttcagttgttgaaattgatatggtcaagtacaattcattttaacccaatttgtaatgatttactggcttggtttcttagctgtttgttttaataaaggattttagttcggtatttggttgttgaaaaaattgatatggccaagtaatggtcatattaacacaattggtaatgttttattagctcaatagtgtttgttaagtatgtgactcaaatttaatcaagtataacttattgaagcgtagttcttttatccattaggtttggctctgtgtttgctggactaattcaatcaacattgttatctaagaaggaaaagggtggaggagaaaatgcttctatcaagaagcctcgtgtacgcggttcattttcattccatggtggaatgcaggtataaccttatagccataatttcgctttttataccttatacttccaaaatatattgatgcattttcttgctacaatcacaaaagctttgggaaaaattctcaattttgtcaaatctactaaaataattcattttggaaccaaggttttctatttcagaatacatggatgaagacatgcagtaagtatggataaaataatctagatgtaaaaggtttttagtctattaagcaagaatattataattcagagtcgtttcatcaataaagtgttgtttaagtgcagcaattacattctgcttcaagcaaaggctatcttaagacttaagaggctcccaaaacatgaggaggtatgagaccttagaggccaaagaaataaaatttgatgaggagacttggtgagataccttgcttccaaaaatgatatatttttccccttagacacctcagattatgacatttataaggtgtccctgcgtattcgacgagattttacgacctatactctaaagtctaaattgagtgagaaatgtgtatatgtgtaagaaaggaaagttagtaccatgaattccatgtctacgacctcaaagtgttcataccattgaaattagtgagcttacaattgttaagaaagcatcaactattcataattgatcattgatgaagtgtgtaatagacatgctaggtgaaattcgaaagggatctactctgtctttgagtttacaatttgcttctagtttttagctatttataggtgctatcaaagggttgaatattgttttttctgaacattgttgccgagttgtgaagggagaatgatggtagatttctcttaatgagaacattctcttcataaagagttcgatagcgcaaaaacgaaagcttattgccaaaagtggctggggtagatgaaagagaactgcaattgattttgctaggcttgactttgagtaaagaattcatggcataaggtagaaaaataggagatggctgaatgatatcgaaaccttttgattctttttgttttgtttgcaatgcacagaaaggcaggacgggaaagtgtgattaaatggatgggaaaaattgctagaatagaaaagaagaaagatgtagcactcacgtgaggaaattacccaatatctgaatggagctcacactcctctcttcctctactaatatacaacctgcctaatttgcacaatagctgctaatatcatagtagtatgagataatggctggatgtctcaattgttaccctagttttgacaactattttacgttggcatttcggtggcctggggccgtggactgagtcaccttaaaaattcatctgtgatatagtttagaatcaattttgaaaatttaggcaggcctaaattttgataaagatagcatgatctaaagaatgcagctctaataaatttacataaaatttgatattaagtagtctctgtctaggcctgccttccgagcttgtatattaactgagcgcatgtttatttgaggaatagcataggagtcatttttttgcatactaattagcatgtcaattttattccatttgctgagtactgtatgttctgcagacacttgttgacacaatgtgcaaacagcttggtgaagacgaactcaaactccagtgtgaggtgctgtccttgtcatacaaccagaaggggatcccttcattagggaattggtcagtctcttctatgtcaaataataccagtgaagatcaatcttatgatgctgtggttgtcactgtgagttttt

SEQ ID NO: 15 - DNA, 760 bp, Amaranthus palmeri
tcaaattggtcaaacccttaaacgatcaactaacgttttccattaagtggtagtcatttgcaaagaaatatattatattatgtagttttttacaaaaaaagaaaactacattaggcagttttttgcaaatagacctattagattttttttttaatttttccttcttgttatttgctgtttctaatgtggcttcaaaaatgaagtttggtaaccaaacttttcaaatttgaagtgagggttgggaagccttttggtgtcccttctattaagagttggggcctcacaatcactagataacgtgcctttctctcatgccttacctttctaattcttagaatagaaaaaagacggtgaattttttatacgctgtatgattacattttttgaaatctctccgatcatcttgatcatgggatggaattgttcgtgcacatgttttttaagaatggaatctaagcatagtgtattagagagaatgagtgaaagttagtggaaagaaaaattgagttggagaataaaataaaaaacaagtgggtaatagaaataagtggttacgatgaagagggtgtataaatttgtagataagattaaaaggggtgggagtaccattgttataaaagaaaagagtgcaaaatccgttggacgaatttaaataaaaagtggtgtaaaatgaaaggaacgacaagaatatgattttcccagctataacactgtcacaaatgtaattcatcaatatcttttcaacatttctctaataatt

SEQ ID NO: 16 - DNA, 1872 bp, Amaranthus rudis
gcgagagagatgagtgcgatggcgttatcgagcagcattctacaatgtccgccgcactccgacatctcgttccgcttttttgctcatacacgaacccaatcccccatcttcttcggaagaccacgaaaattatcatatatccattgttccacaagctcaagctcaactgccaattaccagaacaccattacgagccaaggagaaggagataaagtattagattgtgtaattgttggagctggtatcagtggactttgcattgctcaggctctttctaccaaacacattcaatccaatctcaatttcattgtcactgaagctaaacatcgtgttggaggtaatatcactaccatggagtccgatggctatatctgggaagagggtcctaatagtttccaaccctccgatcctgtgcttactatggcggttgacagtggattgaaagacgatttggtcttgggagatcctaatgcccctcgtttcgtgctctggaatggtaaattaaggcctgttccttccaaacctacggaccttcccttttttgatctcatgagctttcctggtaagattagggctggtcttggtgcacttggtcttcgtcctcctcctcctcctccttcttatgaggaatctgttgaagaatttgtgcgccgtaatctcggcgatgaggtcttcgaacgcttgatcgaacccttttgttctggtgtctatgctggtgatcctgcaaagttgagtatgaaagctgcatttggaaaggtctggaccttagagcaaaagggtggtagtatcatagccggtacactcaaaactattcaggaaaggaaaaataatcctctaccccctcgagacccccgccttcctaaacctaagggccagactgttggatcctttaggaaagggctcattatgttacctaccgccattgctgctaggcttggcagtaaagtcaaactatcgtggacactttctaatattgataagtcgctcaatggagaatacaatctcacttatcaaacacccgatggaccggtttctgttaggaccaaagcggttgtcatgaccgtcccttcgtacattgcaagtagcttgcttcgtccgctctcagatgttgctgcagattctctttctaaattttactatccaccagtcgcagcagtgtccctttcttatcccaaagaagcaattagaccagaatgcttgattgatggagaactaaaaggattcgggcaattgcatccccgcagccagggtgtggaaaccttgggtacaatttatagttcatctcttttccctggtcgagcaccacccggtaggaccttgatcttgagctacattggaggtgctacaaatcttggcatattacaaaagagtgaagatgaacttgcggagacagttgataaggatctcagaaaaattctgataaatccaaatgcgaaaggcagccgtgttctgggagtgagagtatggccaaaggcaatcccccaatttttagttggtcactttgatgtgctagatgctgcaaaagctggtttggcaaatgctgggctaaaggggttgtttcttggtggtaattatgtatcaggtgttgccttggggaggtgtatagagggtgcttatgactctgcttctgaggtagtggatttcctctcacagtacaaagataagtagtcaatagggctccagcatcttggttaagtaactttttgtagctgttgtaatttggaaagatgtaaaatagcccacactcaaacaagtttggaaagatgtaaaagcatgagatacagtcggtgttcattgagaggatagatgcaaataacttggacggaaaaaaaaagaaaaaaaaacaaaacatgtcggccgcctcggtctcta

SEQ ID NO: 17 - DNA, 1605 bp, Amaranthus rudis
atggtaattcaatccattacccacctttcaccaaaccttgcattgccatcgccattgtcagtttccaccaagaactacccagtagctgtaatgggcaacatttctgagcgggaagaacccacttctgctaaaagggttgctgttgttggtgctggagttagtggacttgctgctgcatataagctaaaatcccatggtttgagtgtgacattgtttgaagctgattctagagctggaggcaaacttaaaactgttaaaaaagatggttttatttgggatgagggggcaaatactatgacagaaagtgaggcagaggtctcgagtttgatcgatgatcttgggcttcgtgagaagcaacagttgccaatttcacaaaataaaagatacatagctagagacggtcttcctgtgctactaccttcaaatcccgctgcactactcacgagcaatatcctttcagcaaaatcaaagctgcaaattatgttggaaccatttctctggagaaaacacaatgctactgaactttctgatgagcatgttcaggaaagcgttggtgaattttttgagcgacattttgggaaagagtttgttgattatgttattgacccttttgttgcgggtacatgtggtggagatcctcaatcgctttccatgcaccatacatttccagaagtatggaatattgaaaaaaggtttggctctgtgtttgctggactaattcaatcaacattgttatctaagaaggaaaagggtggagaaaatgcttctattaagaagcctcgtgtacgtggttcattttcatttcaaggtggaatgcagacacttgttgacacaatgtgcaaacagcttggtgaagatgaactcaaactccagtgtgaggtgctgtccttgtcatataaccagaaggggatcccctcattagggaattggtcagtctcttctatgtcaaataataccagtgaagatcaatcttatgatgctgtggttgtcactgctccaattcgcaatgtcaaagaaatgaagattatgaaatttggaaatccattttcacttgactttattccagaggtgacgtacgtacccctttccgttatgattactgcattcaaaaaggataaagtgaagagacctcttgagggcttcggagttcttatcccctctaaagagcaacataatggactgaagactcttggtactttattttcctccatgatgtttcctgatcgtgctccatctgacatgtgtctctttactacatttgtcggaggaagcagaaatagaaaacttgcaaacgcttcaacggatgaattgaagcaaatagtttcttctgaccttcagcagctgttgggcactgaggacgaaccttcatttgtcaatcatctcttttggagcaacgcattcccattgtatggacacaattacgattctgttttgagagccatagacaagatggaaaaggatcttcctggatttttttatgcaggtaaccataagggtggactttcagtgggaaaagcgatggcctccggatgcaaggctgcggaacttgtaatatcctatctggactctcatatatacgtgaagatggatgagaagaccgcgtaa

SEQ ID NO: 18 - DNA, 1238 bp, Amaranthus rudis
gagagagtgcgagagagatgagtgcgatggcgttatcgagcagcattctacaatgtccgccgcactccgacatctcgttccgcttttttgctcatacacgaacccaatcccccatcttcttcggaagaccacgaaaattatcatatatccattgttccacaagctcaagctcaactgccaattaccagaacaccattacgagccaaggagaaggagataaagtattagattgtgtaattgttggagctggtatcagtggactttgcattgctcaggctctttctaccaaacacattcaatccaatctcaatttcattgtcactgaagctaaacatcgtgttggaggtaatatcactaccatggagtccgatggctatatctgggaagagggtcctaatagtttccaaccctccgatcctgtgcttactatggcggttgacagtggattgaaagacgatttggtcttgggagatcctaatgcccctcgtttcgtgctctggaatggtaaattaaggcctgttccttccaaacctacggaccttcccttttttgatctcatgagctttcctggtaagattagggctggtcttggtgcacttggtcttcgtcctcctcctcctcctccttcttatgaggaatctgttgaagaatttgtgcgccgtaatctcggcgatgaggtcttcgaacgcttgatcgaacccttttgttctggtgtctatgctggtgatcctgcaaagttgagtatgaaagctgcatttggaaaggtctggaccttagagcaaaagggtggtagtatcatcgccggtacactcaaaactattcaggaaaggaagaataatcctccaccccctcgagacccccgccttcctaaacctaagggccagactgttggatcctttaggaaagggctcattatgttacctaccgccattgctgctaggcttggcagtaaagtcaaactatcgtggacactttctaatattgataagtcgctcaatggtgaatacattctcacttatcaaacacccgatggaccggtttctgttaggaccaaagcggttgtcatgactgtcccttcatacattgcaagtagcctgcttcgtccgctctcagatgtttgtctgcagattctcttaattaattttccttttcacaattcgcttttacagggttttccttcacctacagaaacaccaaagttaagaaatctgattttaccctccaatttatctccctga

SEQ ID NO: 19 - DNA, 635 bp, Amaranthus rudis
ggccagggtgtggaaaccttgggaacaatttatagttcatctcttttccctggtcgagcaccacccggtaggaccttgatcttgagctacattggaggtgctacaaatcttggcatattacaaaagagtgaagatgaacttgcggagacagttgataaggatctcagaaaaattctgataaatccaaatgcgaaaggcagccgtgttctgggagtgagagtatggccaaaggcaatcccccaatttttagttggtcactttgatgtgctagatgctgcaaaagctggtttggcaaatgctgggctaaaggggttgtttcttggtggtaattatgtatcaggtgttgccttggggaggtgtatagagggtgcttatgactctgcttctgaggtagtggatttcctctcacagtacaaagataagtagtcaatagggctccagcatcttggttaagtaactttttgtagctgttgtaatttggaaagatgtaaaatagcccacactcaaacaagtttggaaagatgtaaaagcatgagatacagtcggtgttcattgagaggatagatgcaaataacttggacggaaaaaaaaaagaaaaaaaaacaaaacatgtcggccgcctcggtctctactga

SEQ ID NO: 20 - DNA, 5704 bp, Amaranthus rudis
attaagttttgatgtttttagctgcaataatttgttgatgaaaaagccactacttttttctcagctgcaaattatgttggaaccatttctctggagaaaacacaatgctactgaactttctgatgagcatgttcaggaaaggcaagtgccacatactattaagtgttagttgctgagaatatatttgaatctaagatgcacgaagaccactggtgcccttgctctatcaattctgatggaaaggattatcgctgaatttaccttctactaaaacatcgataaaatacttcattattagcatcaaaagattccctccatccttctggttttgctagacttgccttatgaaggtgttcaaggagtagtttgctacccttcaagatagggtagtggttgccgtctctcataatttcagtcactcgttttcctctcctaattcaagccataatttttatggttcctccacacaacacttgctaaatttgaaaagtagcaaagaggaagtgagcaaaatcagcaggagtaggactgatgagtaagagcttgattaagtgtagaggattttcttttgtgttgaatatgaatgcatcatgcatgactgtagaattgacataatgatttgtctgcagcgttggtgaattttttgagcgacattttgggaaagaggtattgttgccaattgccatgctctattcattccggtgaattaacaaatgttgtgcttctgcttactattgcttataattattgtttgttgcagtttgttgattatgttattgacccttttgttgcgggtacatgtggtggagatcctcaatcgctttccgtgagttaaatactgtgcttgcttttttttttttcaacattttctggaggctgtaaataaattatactcctttctattctaatcaaatatcctatttccccttttggcatattcaaatttagttaaatattgtgtaaattatttacacaattgccattaaattttcacttttcccttactcactcttctcatgtgtcccttcccccttttcttaaaattggtgcattatcaaataggacatttgatttgaataggcgggagtttccaattgtgcttccaaaggtagcttgtcactttttctttttctttaaattttgtaccatgccatgcattttgaacctcaactcatttcgccataaaggaatattatgtttgagaagaacgaggatactattatcttatagataacatataggtttcattatcaatgattgtttgattttcaactcttcttttcctttcatgctcatattgatgttatttctatttgttatgaattatgtccattgtgttaatgtctttctttattgtagatgcaccatacatttccagaagtatggaatattgaaaaaaggtatgaaccttaaagctttaattttcttcgaacttaatgtttcttaattgattcttttggatcaatttccataagaatggaaatttaaaaaagggtatgaaccttaaagatttcttcgaacttatatgttttgtaattcatgcttttagatgctgcaccattttatctatgtgtcttaagtttgttgtaatcatttgtagaccaaaagaatgaatggtctggtttgaaatggttcatcgtgcaaaaatgcgattttgcttgtgattgaggtaacattcaaggtggtgtgtttgtcgtactgtcaaatgtcttcctataccatgtgatatatatataagcctaaaatgatatattgtacacctttaggatgtggatagcaggggttcagtacatatgaaaaatccttgcaatttgatctgtacgatcaatgtgattttgccttttgccttttgccttttgttatatgatgatgattccatgtgaaattttgggatttagaaaattcacttgtttaagaacatttgaatcaaactttcaccaatttcaaccacatttaattgcggcaaagccgaactttaaaagtcactcccaatctttgagatatccaaactccaaaacttctattagctttcatgttttcaccaagtaaagttggtgcgactccttaccattttctttattatgcatttcgttgatgtataatagtatagattggtgctctctttgctctccttccaacatgcataacttctagttcttgtcgttttcttttcctccctatttttatttgacttgtagctatttttgttcactcttctcgcccaatccatagctaaagaaacttgatttcattgattttgtaactgatatgcaattcatttttgtttgcttttagttgttgattcaaaaacaataatgctaaagccctaatcctaacatgtcgggttagctgttgaaacaatacttgaaattgctataaaaagggattttttttcgggtacttcagttgttgagattgatatggtcaagtataatttgttttaacacaatttgtaatgatttaatggcttagtttcatagctgtttgtattaataaaggaaggaggactatctgaaattgcaataggaaagagattttagttcggtatttggttgtttaaattgatatggccaagtaatgttcattttacacaattggtaatgttttattggctcaatagtgtttgtaagtatgcgactcaaatttaatcaagtataacttattgaaacataaataaatatccattaggtttggctctgtgtttgctggactaattcaatcaacattgttatctaagaaggaaaagggtggagaaaatgcttctattaagaagcctcgtgtacgtggttcattttcatttcaaggtggaatgcaggtataaacttgtagccataatttcactttttataccttatacttccaaaatatattgatgcgtttttcttgctacaaagtacaaacacaaaagctttgggaataattctcaattttgtcaaatctactaaaaatattctattaggaatcaaggtttctattttagaatatatggatgaagacatgtagaagtgtgaataaaaaaacctagatgtgaaaggtttttagtctattaaacaagaatattagaattcagagtcgtttcatcaataaaatattgttgaagaggagcaattacattctgcttcaagcaaaggcaatcttaagaggaccctaaaacttgaggaggtatgagaacttagaggccaaagaaattaaatttgatgaagagatttggtgagataccttgcttacaaaaatgattaattttccccttagacacctcaaattatgacatttataagttctccatgcgtattcgacaagatgttacatcctatattctaaattaagtatgaaatttgtatatgtgtaagaaagaaaagttagtcccttgaattccatgtctacgacctcaaagtgttcataccattgaaattagcgagcttacgattgttaagaaaggatcaacttgtcatcattgatcattgatgaagtgtgtaatagacatactaggtgaaattcaaaagggatctactcagtctttgagtttaccgtttgcttctagtattttgctatttataggcactatcaaagggttcaatattgttttttctgaacattgttgccgaattgtgaagggagaatgatggtagatttctcttatttttatgagaaaattctctttataaagagttcgatagctcaaaaatgaaagcttattgccaaaagtggatggggtagatgaaggagaaatgcaatcaattttggtaggcttgactttgagtaaagaatttgtggaataaggtagaaaaataggatttggctgcatgatattgaaaccttttgctacttttctttttgttttggttgcaatgcacagaaaggcaggacggtaaagtgtgataaaatggatgggaaaaattgctagaatagaatagaagaaaaataatggcaggatgtatcctttgttaccctagtttcgacaactgtgttacgtcggtattatcggtggcttggactgagtcatcatagaaattcttctctgatatagtttagatgaaatttttaaaatttaagcaggcctgaattttgataaagatagcatgatctaaagaaggcagctctaataaatcaacataaaatttgatattaagtagtctctgtctaggcctgctttccgagctagtatattaactgagtacatgttattagagcaatagcataggagtcatgtttttgcatactgattagcatgtcaattttattccatttgctgagtactgtatgttctgcagacacttgttgacacaatgtgcaaacagcttggtgaagatgaactcaaactccagtgtgaggtgctgtccttgtcatataaccagaaggggatcccctcattagggaattggtcagtctcttctatgtcaaataataccagtgaagatcaatcttatgatgctgtggttgtcactgtgagtttttgtctacttttgtctctatgagcatgcaattcctttcacagccgttgagttagcaattatattccagtttgaaacttaaagttttttgggggaatttttctagcattcaagtcaatcaaggcttatttggaactcaaagctttatctatgttatatgaaactacaataaaatgatttctaaaaaattaattgcgaatagcggagattcaattagggtgtataattgatccacatcaaatagcatgcattctacatgttagtcacttgtggcttctctagtcctctgtctccagaaaaagcctgcatacaaaggctcatgaagactagtatgctatatactttccgaaatgtcagcattaagtaacttgtgttgaggaaatatgtaaatcgtaccctgttaccctctttttaaagagtgattttttttttaattgaatgtggttatagctatctggtttgatgaagatttaccattcttaatgaagcaaaaaattttaagttcacaagtttcaattatattaggcatttaggctgctatacagtgaattggctcgataaattttgcgcatgtcttatttatgtgaattgtagataacgtttgctacaaagggtcaatcaagaacaaccttttcatttttgtaaggataactcctaaattctgcctaggttggaggatatgtggaagtcacttaatggcaataggactgaaatattgttgaatatggttatctagtaccaattcacacttgtatacatgagtacatgtctaatgctctttgttgtgatttacttaaacaagaattatgttcattagcaggctttcatgctctctgtacagcaccttatctttcctttaccacgatactatttgtcttgtttaattatacatatatcataaatgtttcgacattcggtctaaaatattttggatgggtgtatactgtttaatgcaacaatatgtaaaatagatacataaagaaaagtaaaaggaataatgaattacaaaaaatacgatgaaaattgaaaatggatgttgtatttcaaaaggaggttaaaggagtgatttgcttccaaagtagaaatcattccgagttcgtagattgttttaagaataccgagtgtagtatggattatggtggacaaaattttctataatattttttcataaacaatagtgaagcaaaaaattattggcgaaacaggtgtcagcttaaaatttccttttcacatggttattttcgtcatagctc

SEQ ID NO: 21 - DNA, 1031 bp, Amaranthus rudis
ttttaaccaatcctcaaaatttacaccatggagatgtctgcggataagaattagtaactgtagcagctgtaattgttgcatgcagttttatggtttgccttgcaattcaaacttgggatattgtttgccttgcaatttgtagtttagtgtttgcccttcactttgtattttagttatttttttcattgcaatttgctctttgaagtataaaatggtgacctttcttgctcaggatgttgctgcagattctctttctaaattttactatccaccagtcgcagcagtgtccctttcttatcccaaagaagcaattagaccagaatgcttgatcgatggagaactaaaaggattcgggcaattgcatccccgcagccagggtgtggaaaccttgggtatatgctcccattcaactatatctcaataattatgagtatttttctttctctggattattcaatttggtgacgttaaattttgactgtactcgacaggaacaatttatagttcatctcttttccctggtcgagcaccacccggtaggaccttgatcttgagctacattggaggtgctacaaatcttggcatattacaaaaggcaagtcatttatacaattatatgtgtccttgtatcctcaaataagtcgtatcaatcctgacgacatgcttctatcaatgcagagtgaagatgaacttgcggagacagttgataaggatctcagaaaaattctgataaatccaaatgcgaaaggcagccgtgttctgggagtgagagtatggccaaaggcaatcccccaatttttagttggtcactttgatctgctagatgctgcaaaagctggtttggcaaatgctgggctaaaggggttgtttcttggtggtaattatgtatcaggtgttgccttggggaggtgtatagagggtgcttatgactctgcttctgaggtagtggatttcctctcacagtacaaagataagtagtccatagggctccagcatcttggttaagtaactttttgtagctgttgtaattt

SEQ ID NO: 22 - DNA, 1017 bp, Amaranthus rudis
agagagtgcgagagagatgagtgcgatggcgttatcgagcagcattctacaatgtccgccgcactccgacatctcgttccgcttttttgctcatacacgaacccaatcccccatcttcttcggaagaccacgaaaattatcatatatccattgttccacaagctcaagctcaactgccaattaccagaacaccattacgagccaaggagaaggagataaagtattagattgtgtaattgttggagctggtatcagtggactttgcattgctcaggctctttctaccaaacacattcaatccaatctcaatttcattgtcactgaagctaaacatcgtgttggaggtaatatcactaccatggagtccgatggctatatctgggaagagggtcctaatagtttccaaccctccgatcctgtgcttactatggcggtaaactgattcttctctctttctccaatttttgatcattctattcaattttccccttattgaatcaaaatcaaattccaggttgacagtggattaaaagacgatttggtcttgggagatcctaatgcccctcgtttcgtgctctggaatggtaaattaaggcctgttccttccaaacctacggaccttcccttttttgatctcatgagctttcctggtaagattagggctggtcttggtgcacttggtcttcgtcctcctcctcctcctccttcttatgaggaatctgttgaagaatttgtgcgccgtaatctcggcgatgaggtcttcgaacgcttgatcgaacccttttgttctggtacctaccctgtttaatttttcaattttcccccttttttctctactactactttattgattcttatccatgagtgtactatgggagttgacaataattgttcaggtgtctatgctggtgatcctgcaaagttgagtatgaaagctgcatttggaaaggtctggaccttagagcaaaagggtggtagtatcatagccggtacactcaaaactattcaggaaaggaa

SEQ ID NO: 23 - DNA, 630 bp, Amaranthus rudis
  unsure (1)..(630): unsure at all n locations
gtcttgggagatcctaatgcccctcgtttcgtgctctggaatggtaaattaaggcctgttccttccaaacctacggaccttcccttttttgatctcatgagctttcctggtaagattagggctggtcttggtgcacttggtcttcgtcctcctcctcctcctccttcttatgaggaatctgttgaagaatttgtgcgccgtaatctcggcgatgaggtcttcgaacgcttgatcgaacccttttgttctggtacctaccctgtttaattttntcaggtgtctatgctggtgatcctgcaaagttgagtatgaaagctgcatttggaaaggtctggaccttagagcaaaagggtggtagtatcatagccggtacactcaaaactattcaggaaaggaaaaataatcctccaccccctcgagacccgtccgtaatcaccattacttattgctttccatcaccttgaatcttaccttaatatacatgtatttaattgataatgtcacattgcctcatttgcagccgccttcctaaacctaagggccagactgttggatcctttaggaaagggctcattatgttacctaccgccattgctgctaggtatcttttgactctcaaaccttatatat

SEQ ID NO: 24 - DNA, 612 bp, Amaranthus rudis
acactcaaaactattcaggaaaggaaaaataatcctccaccccctcgagacccgtccgtaatcaccattacttattgctttccatcaccttgaatcttaccttaatatacatgtatttaattgataatgtcacattgcctcatttgcagccgccttcctaaacctaagggccagactgttggatcctttaggaaagggctcattatgttacctaccgccattgctgctaggtatcttttgactctcaaaccttatatatttctcatcttctccttctgccagtgccatactaatactagtatctttaccatatattttttatttttttaggcttggcagtaaagtcaaactatcgtggacactttctaatattgataagtcgctcaatggagaatacaatctcacttatcaaacacccgatggaccggtttctgttaggaccaaagcggttgtcatgaccgtcccttcgtacattgcaagtagcttgcttcgtccgctctcagtgagtatcattctttccttcatttctattcttttaatgctatccaatgtcttattaagcactagtttggcgttgtgctcatcaactatgactataatgttaactaatag

SEQ ID NO: 25 - DNA, 487 bp, Amaranthus rudis
ttgatttgaagataggataaccagagagagtgcgagagagatgagtgcgatggcgttatcgagcagcattctacaatgtccgccgcactccgacatctcgttccgcttttttgctcatacacgaacccaatcccccatcttcttcggaagaccacgaaaattatcatatatccattgttccacaagctcaagctcaactgccaattaccagaacaccattacgagccaaggagaaggagataaagtattagattgtgtaattgttggagctggtatcagtggactttgcattgctcaggctctttctaccaaacacattcaatccaatctcaatttcattgtcactgaagctaaacatcgtgttggaggtaatatcactaccatggagtccgatggctatatctgggaagagggtcctaatagtttccaaccctccgatcctgtgcttactatggcggtaaactgattcttctctctttctccaatt

SEQ ID NO: 26 - DNA, 1582 bp, Amaranthus spinosus
agagagagtgcaagagagatgagtgccatggcgttatcgagcagcattctacaatgtccgccgcactccgacttctctttccgcttttctgcttatacaccaacccgctcccccttcttcttcggaagacctccaaaattatcatatatccattgttccacaagctcaagctcaactgccaattaccagaacacgattacgacccaaggagaaggagataaagtattggattgtgtaattgttggagctggtatcagtggactttgcattgctcaagctctttctaccaaacacattcaatccaatctcaatttcattgtcactgaagctaaaaaccgtgttggaggtaatatcactaccatggagtccgatggctatatctgggaagagggtcctaatagtttccaaccctccgatcctgtgcttactatggcggttgacagtggattgaaagatgatttggtcttgggagatcctaatgcccctcgtttcgtgctctggaatggtaaattaaggcctgttccttccaaacctacggaccttcccttttttgatctcatgagctttcctggtaagattagggctggtcttggtgctcttggtcttcgtcctcctcctccttcttatgaggagtctgttgaagaatttgtgcgccgtaatctcggtgatgaggttttcgaacgcttgattgaacccttttgttctggtgtgtatgctggtgatccttcaaagttgagtatgaaagctgcatttggaaaggtctggaccttagagcaaaagggtggtagtatcatcgccggtacactcaaaactattcaggaaaggaagaataatcctccaccgcctcgagacccccgccttcctaaacctaagggccagactgttggatcctttaggaaagggctcattatgttacctaccgccattgctgctaggcttggcagtaaagtcaaactatcatggacactttctaatattgataagtcgctcaatggtgaatacaatctcacttatcaaacacccgatggaccggtttctgttaggaccaaagcggttgtcatgactgtcccttcatacattgcaagtagcctgcttcgtccgctctcagatgttgctgcagattctctttctaaattttactatccaccagtcgcagcagtgtccctttcttatcccaaagaagcaattagaccagaatgcttgatcgatggagaactaaaaggattcgggcaattgcatccccgcagccagggtgtggaaaccttgggaacaatttatagttcatctcttttccctggtcgagcaccacccggtaggaccttgatcttgagctacattggaggtgctacaaatgttggcatattacaaaagagtgaagatgaacttgcggagacagttgacaaggatctcagaaaaattctgataaatccaaatgcgaaaggcagccgggttctgggagtgagagtatggccaaaggcaatcccccaatttttagtaggtcactttgatctactagatgctgcaaaagctggtttggcaaatgctgggctaaaggggttgtttcttggtggtaattatgtat

SEQ ID NO: 27 - DNA, 1485 bp, Amaranthus thunbergii
agagagtgcgagagaaatgagtgcgatggcgttatcgagcagcattctacaatgtccgccgcactccgacatctcgttccgcttttctgctcattcaccaacccactcccccatcttcttcggaagaccacgaaaattatcatatatccattgttccacaagctcaagctcaactgccaattaccagaacacgattacgacccaaggagaaggagataaagtattagattgtgtaattgttggagctggtatcagtggactttgcattgcgcaggctctttctaccaaacacattcaatccaatctcaatttcattgtcactgaagctaaacatcgtgttggaggtaatatcactaccatggagtccgatggctatatctgggaagagggtcctaatagtttccaaccctctgatcctgtgcttactatggcggttgacagtggattgaaagacgatttggtcttgggagatcctaatgcccctcgtttcgtgctctggaatggtaaattaaggcctgttccttccaaacctacggaccttcccttttttgatctcatgagctttcctggtaagattagggctggtcttggtgcacttggtcttcgtcgtcctcctcctccttcttcttatgaggaatctgttgaagaatttgtgcgccgtaatctcggcgatgaggtcttcgaacgcttgatcgaacccttttgttctggtgtgtatgctggtgatcctacaaagttgagtatgaaagctgcatttggaaaggtctggaccttagagcaaaagggtggtagtatcatcgccggtacactcaaaactattcaggaaaggaagaataatcctccaccccctcgagacccccgccttcctaaacctaagggccagactgttggatcctttaggaaagggctcattatgttacctaccgccattgctgctaggcttggcagtaaagtcaaactatcgtggacactttctaatattgataagtcgctcaatggtgaatacattctcacttatcaaacacccgatggaccggtttctgttaggaccaaagcggttgtcatgactgtcccttcatacattgcaagtagcctgcttcgtccgctctcagatgttgctgcagattctctttctaagttttactatccaccagtcgcagcagtgtccctttcttatcccaaagaagcaattagaccagaatgcttgatcgatggagaactaaaaggattcgggcaattgcatccccgcagccagggtgtggaaaccttgggaacaatttatagttcatctcttttccctggtcgagcaccacccggtaggaccttgatcttgagctacattggaggtgctacaaatgttggaatattacaaaagagtgaagatgaacttgcggagacagttgataaggatctcagaaaaattctgataaatccaaatgcgaaaggcagccgtgttctgggagtgagagtatggccaaaggcaat

SEQ ID NO: 28 - DNA, 1808 bp, Amaranthus viridis
ggataaccagagagagtgcgagagaaatgagtgcgatggcgttatcgagcagcattctacaatgtccgccgcactccgacatctcgttccgcttttctgctcattcaccaacccactcccccatcttcttcggaagaccacgaaaattatcatatatccattgttccacaagctcaagctcaactgccaattaccagaacacgattacgacccaaggagaaggagataaagtattagattgtgtaattgttggagctggtatcagtggactttgcattgcgcaggctctttctaccaaacacattcaatccaatctcaatttcattgtcactgaagctaaacatcgtgttggaggtaatattactaccatggagtccgatggctatatctgggaagagggtcctaatagtttccaaccctctgatcctgtgcttactatggcggttgacagtggattgaaagacgatttggtcttgggagatcctaatgcccctcgtttcgtgctctggaatggtaaattaaggcctgttccttccaaacctacggaccttcccttttttgatctcatgagctttcctggtaagattagggctggtcttggtgcacttggtcttcgtcgtcctcctcctccttcttcttatgaggaatctgttgaagaatttgtgcgccgtaatctcggcgatgaggtcttcgaacgcttgatcgaacccttttgttctggtgtgtatgctggtgatcctacaaagttgagtatgaaagctgcatttggaaaggtctggaccttagagcaaaagggtggtagtatcatcgccggtacactcaaaactattcaggaaaggaagaataatcctccaccccctcgagacccccgccttcctaaacctaagggccagactgttggatcctttaggaaagggctcattatgttacctaccgccattgctgctaggcttggcagtaaagtcaaactatcgtggacactttctaatattgataagtcgctcaatggtgaatacaatctcacttatcaaacacccgatggaccggtttctgttaggaccaaagcggttgtcatgactgtcccttcatacattgcaagtagcctgcttcgtccgctctcagatgttgctgcagattctctttctaagttttactatccaccagtcgcagcagtgtccctttcttatcccaaagaagcaattagaccagaatgcttgatcgatggagaactaaaaggattcgggcaattgcatccccgcagccagggtgtggaaaccttgggaacaatttatagttcatctcttttccctggtcgagcaccacccggtaggaccttgatcttgagctacattggaggtgctacaaatgttggaatattacaaaagagtgaagatgaacttgcggagacagttgataaggatctcagaaaaattctgataaatccaaatgcgaaaggcagccgtgttctgggagtgagagtatggccaaaggcaatcccccaatttttagttggtcactttgatctgctagatgctgcaaaagctggtttggcaaatgctgggctaaaggggttgtttcttggtggtaattatgtatcaggtgttgccttggggaggtgtatagagggtgcttatgactctgcatctcaggtagtggatttcctctcacagtacaaagacaagtagtcaatagggctccaccttcctggttaactaacttttgtagctcttgtaatttgtatcatgtaatattattcagatgtaaaagatacagtcggtatttattgagaggatagatgcaaataactt

SEQ ID NO: 29 - DNA, 1829 bp, Ambrosia trifida
ggaacatcaaccagataagactttcccccaataaaaatgtcatctctcacaaacctcccttccctgaaccactaccgcacctggtcttccccacccattccccatcgaacccaatcatccaaaccccctaaccacctaaccacctatggtcccaccaataacaaccacaacagacgtacaacaacaaccttccgttgctcaatagccaacgacactccaatctctcctccaattaccaacgactccaattctaaacccttactggactgtgttattattggtgctggaatcagtggtctctgcattgcccaagccctagctactaaacatgctgacgtgtcacctgatgtggttgttacggaagcacgtgatagggttggaggtaatatatcgacggttgaacgtgatggatatttgtgggaagaaggtccgaatagttttcaaccgtctgatccgatgctcactatggtggtggatagtgggttgaaagatgatttggttttaggggaccccactgcaccacggtttgtattgtggggtggtggtttgaagccagtgccttccagtccagctgatttgcctttctttgatctaatgagctttactggaaaactcagagccggttttggtgctctagggatccgccctccaccaccagatcgtgaggaatctgttgaagaatttgttcggcgtaaccttggtgatgaagtttttgaacgcttaatagaaccattttgttcaggtgtttatgctggcgacccatcaaaacttagtatgaaagcagcatttggtaaagtttggaagctggagaagaatggtggtagcattattggtggagcattcaaagcaatccaagcaaaaataagagtaccaagcctcctcgggacccgagattaccaacaccaaagggccaaactgttggatcttttaggaagggacaagccatgttgcccaatgccatctcaaaacgtttgggtagcagagtgaaagtgtcatggaagctaataaatatctcaaagttggagaatagaggttataatctgacttacgaaacaccaaatggatttgcaagtctgcaaactaaaactgttgtcatgactgttccttcctacgtggcgagtgacttgttgcgtcctctttcgtcggaagcagcagaggctttgtccaaattttattaccctccagttgctgctgtatctgtttcctatccaaaagaagcgattcgtgctgaccgtttgatcgatggtcaacttaagggttttggtcaattacatccaagaagtcaaggcgttgagactttaggtaccatctatagctcatcccttttccctaaccgggcgccacctggaagggttctcctccttaactacattggaggggctacaaatcctggtattttgtcgaagacggagagtgaacttgtggaagcagttgaccgtgacctaaggaagatgctcataaaccctagagcaggcgaaccgttgactttgggggtcaaagtgtggcctcgagcaatcccacagtttctaattggtcattttgacattttggatgctgcaaaatttgctcttagtgaaggtggatatagaggtatgtttcttggaggcaactatgtttctggtgtggctttaggtcgatgcgtggagagtgcttatgacgttgcagccgatgtaagtacatttttgtcacgaggcgtgtataagtgatactgttatgtagcactttggaatactttcttgtgaggttagtggttacctttttgtcacaaggcaggtacaaataacaagccaattattggagttcaataataataatttttgtgtaggtta

SEQ ID NO: 30 - DNA, 921 bp, Ambrosia trifida
gactgacagagaaaccaacaatggcttcaccaactatagttgacaaccaaaaacctgctaagagagttgctgttgttggtgctggtgtcagtggttgtgctgctgcttataagttaaagttacatggattgaatgtgactgtgtttgaagctgatgggagcgttggtgggaaactaaagagcgtttcgcaagatggtttaatatgggatgagggtgccaatactatgactgagagtgaggcagatgttagcagtttgattgatgatcttgggcttcgagataaacagcagtttccaatttcacagcacaagcggtacattgtaagaaatggaaaacctgtattgataccttctaacccaattgcactgattagcagcagttttctttccactcagtcaaaggttcaaattcttttagagccatttttatggaagaagactaagtcatctgacgaacccgagagtgttggaggattctttcaacgtcattttgggaaggaggttgttgagtatctcattgatccagttgttgcgggaacaagcggtggagatcctgaatcactctctatgcgtcatgcatttcctgagctatgggatttagagagaaggtttggttcaatcatttctggggcatttcaatctatggtatcttccagaggtgggaaaaggaaaccttctggaaacagcaaacgtaggcgtggttccttttctttttttggtgggatgcagacactcactgatgcactatgcaaagagattggaccccatgaagttaatcttcaatcaaaggtgcttgaaatgtcctacagctgcgatgataatgcggttggtaattggtcaatttattgtgctccagatcaaaacaaacaatttcagcaatcttttgatgctgtgatcatgactgccccacttaacaacctgc

SEQ ID NO: 31 - DNA, 811 bp, Ambrosia trifida
tttctagcaatcttttgatgctgtgatcatgactgccccacttaacaatgtaaaagaaatgaagattacaaagacaggaagtccgtttctgcttaattttattccagaggtgagttatttgccaatatcagtaataatctccactttcaagaaagaaaacgtgaagcagcctcttgagggttttggagttcttgttcctgccaaggagcaggaaaatggtttgaggacactaggcaccctcttctcttccatgatgtttccagatcgggcctcagaagacgtgtacctttacaccacctttgttgggggtagtcgaaacaaagaactggccaaagcttcgagggacgagttgaagcagatagtaacttctgacctcagacagttgcttggaacagaaggggagccaaaatttctaactcactattattggagcaaagcatttccattgtatgggcgtgactatggttcagttattgaagcaattgagaagatggaaaaagagctacccggttacttttatgcaggtaaccacaaaggagggctctctgttgggaaagcaatatcctccggatgcaaagcagccgaatccgtgattgcatatttggattcttattcggaccagaagtagaaggatgggtgttgctagatgatgttttaactggattggccggagaatgtagatcaaaagagtttttgttcgctagagcgaggataaatttgacgaaaattcagcatggcttttcgttttgtgtttttgaaggtgagcaaggatggtgttgtataaacttattgttgagtaaattataactaa

SEQ ID NO: 32 - DNA, 4915 bp, Ambrosia trifida
cgcacgcaatggttttgcacttttgcccacagtaaagaaaaggtagcctctctacccgacccgacccgacccgaaccaaaccgataaaaacaaataccaactctgataaccagattactcacagagaaaccaacaatggcttcaccaactatagttgacaaccaaagttagggttcttctaaattctaattacattttatcctaattttacttacacatttgtagcatttgcatctataattcagaaacctaatctaatttattaattaattaattaagtggttttgttttctctacagaacctgctaagagagttgctgttgttggtgctggtgtcaggtacttaaacttaaaacctaaaacagataattattttgcttatttactagattcacttattctgttcatgtaatttgctaaggtttgatcagtcaattatatacatttagggatttaggagttacagaatgttttgatataataatatatacaatttgtaaaaatatatagatcatgattgataattagaggaatggaatattttgataattgaaaaaacaatatgttacatttttttcagtggttgtgctgctgcttataagttaaagttacatggattgaatgtgactgtgtttgaagctgatgggagcgttggtgggaaactaaagagcgtttcgcaagatggtttaatatgggatgagggtgccaatactatggtatgttttagtataatatgattggtttcactttgttagcattttttatgaggtttgttgtatgtgttaccttatgtagactgagagtgaggcagatgttagcagtttgattgatgatcttgggcttcgagataaacagcagtttgtaagttgttgtgtttgatatagctgccatacttcctatagcttgtgtggtaaattatatctatgaacatatgcaattattttgtaaaatgacaagaaacagattctttgttttatttgtgtatgaataatgaatagataagactaaattcatttttaggtctgcttcgatttgtcttttataatcactacgctgagttttaaatctttaacattatttcctgttgcagccaatttcacagcacaagcggtacattgtaagaaatggaaaacctgtattggtatggatatctcaacaccacttaactagtgatcctctatttttagtaaaattcatttactaaaaaaaggggggctgaaaaattaaaatttaatgtgaattgtgctttattaggtttgaatgcttaacctcatcaaagtcaaataataacatgagtagtctgttgctctggaaacccgtattgcaacccatgaaaagatccaaatcacggtttttcaaacactgttttatacttttatgtccagggaacaaaaaaccaaaatctttcctgagtgaggccttagttgtcttcttattatttatcttttatatttatcaagttcatgtctctctatattgaccatgactcagtctatatcatgattgcagataccttctaacccaattgcactgattagcagcagttttctttccactcagtcaaaggtatgttagtagctcctgccaccttgaaggttcaagcataagtatgccatatcttattgagatcgttcactcgcatactatcttcttaatgttgttcaatgttgagattaaagtgcaatctttattctattttgcttaatcaaatataatgtttatttattttaattttattaaaaaagtatctacgtaagtattacaaaaagtaaaaactcttccccgttgatgagatgatctcaaagtctaatgtcatatatctagtactctcaataagctaacataaacagtatagtctattaaaagggtccccaacatcgaaatgagtaacgctgctttgagttaagggtgcaaaatgtcatataataaataaagatgttctatgatgctttgatatttgtttcgcactttcacttatcccccatggtatttttaacttgtttttaaaagtagaagattttttttattgatgtgcatgcgattattatcggctttgtttgcaaattttacaggttcaaattcttttagagccatttttatggaagaagactaagtcatctgacgaacccgagaggtaaaatacatagccttgttccatttcatcggcttgaagtagttatattcggtacatgccattaggttcttaaccatgtattttgcagtgttggaggattctttcaacgtcattttgggaaggaggtgtttgtatattcgacataatgttttgtttctgttctgattctgtttctcatagttattaatatttgacctgcttatctaaggttgttgagtatctcattgatccagttgttgcgggaacaagcggtggagatcctgaatcactctctgtgagtaactattgtttctccacacatttttttggagaaatatacattgctgctttacattaacgaccttaaaccgtttaatatattgcttgaattcttttacttttccacacagatgcgtcatgcatttcctgagctatgggatttagagagaaggtatgtttgtaacaaacagtagtaattcttcttcaaacgatctgtggaataatgacttttgaccacttatttctgaagacctaaaatcaatttaatacttacaactatttaattcaggtttggttcaatcatttctggggcatttcaatctatggtatcttccagaggtgggaaaaggaaaccttctggaaacagcaaacgtaggcgtggttccttttctttttttggtgggatgcaggtaagacgagggtgatttactgatttagataagaccctaaatttagttattgttatcttttaattaattacagatgttatttgggtcgttcatgcttttttgctatgcagacactcactgatgcactatgcaaagagattggaccccatgaagttaatcttcaatcaaaggtgcttgaaatgtcctacagctgcgatgataatgcggttggtaattggtcaatttattgtgctccagatcaaaacaaacaatttcagcaatcttttgatgctgtgatcatgactgtgagtgccttcattgggtaatcttttacttatcagtgacataaagttagttaatttcttgcattcttgatgaagatagttttttgtatctttaaagtttattctgtgtcctctaggtagtatctggatattaatacatgggatgggaatttttttaatcttgagtttttctctgatggttattaagtgttagatgcatctaattttaactgacaaagaaaatattccccaattaggccccacttaacaatgtaaaagaaatgaagattacaaagacaggaagtccgtttctgcttaattttattccagaggtatgtttttttttcttctactaaagcattagttttagttctatcaaatctaacactgaatacagaaaacagctttaacatcgtcatccaattaaattgtgaaatatttatagtgtcatttcttagccttttgtttttataatacaggtgagttatttgccattatcagtaataatctccactttcaagaaagaaaacgtgaagcagcctcttgagggttttggagttcttgttcctgccaaggagcaggaaaatggtttgaggacactaggtgaagcttgattctgccctccattattgttttttatttgtttacattgacaccatagcaaaaattctgctatgcaggcaccctcttctcttccatgatgtttccagatcgggcctcagaagacgtgtacctttacaccacctttgttgggggtagtcgaaacaaagaactggccaaagcttcgaggtaggcaggcttgctcatcaccatattcccccttaaaattgtagtgtgaacttaactcaagttctaattaattttttgtgcatatgttcaaaatctatgatagccttctgaaagacaaagtaaaaaaagtctttactgattaattgtggtaaaatcaatttattcataatgacgttaattgacaaataggtcttggaaactttcctagtagaggatatgttgtaacttttaactcaaaaatctttcttgcaaaatagggacgagttgaagcagatagtaacttctgacctcagacagttgcttggaacagaaggggagccaaaatttctaacgtaagggcacaacgctatttcagtttaacagtaatctttgctagaataagaaatgtaaccgcttgcctacctatggtctttttatctgttaaacaaaattttgtttaataaccactagcctggtgtagtggcaaaggtgtatctccctcatccaagaggtgttgggttctagtctcacttgagacaaggggaacattataagcggagtaaaaaattagccgtttaaaaaaaaaaaagtttgtaatttgaagttttccatcatgaactgaaacagttgctaaaatgtaacaagaagttattaaagtcttgaggtacatagatatatacacaatgtaaatatggcttacggagttgtgaggttgattgcagtcactattattggagcaaagcatttccattgtatgggcgtgactatggttcagttattgaagcaattgagaagatggaaaaagagctacccggttacttttatgcaggtaacatgttttgtcttgaaaataaaaatggacaaatcatatgttgatgagtagaggtggcaattttgacctattataacttacagagggatagatactgccatactggttacgtatttctttaatgggtcacacgggtagaaataaaaatatagctcgggtcaaaagaagcctaaagtttattctgagcatacaacttcctagtcgtcgtatttcagaaattaaattcttatgttaataagataattttggt

SEQ ID NO: 33 - DNA, 851 bp, Ambrosia trifida
ttgcgcctcggttttggacctcgtcgctttagtgcgcttcgcgctttttaaaaccaagcttctatcgagtttaatgactaaaatttagtaaaatataatgaccaatatggaaggtatttcatgacaattaaccctaaatatattaggtaaccacaaaggagggctctctgttgggaaagcaatatcctccggatgcaaagcagccgaatccgtgattgcatatttggattcttattcggaccagaagtagaaggatgggtgttgctagatgatgttttaactggtaaactttatttcttatatcttattttttttcttatttttcaatgcaaagagtcaaacggcgcaagtgtaatatcaggattggccggagaatgtagatcaaaagagtttttgttcgctcgaggttggataaatttgacgaaaattcagcatggcttttcgctttgtgtttttgaaggtgagcaaggatggtgttgtataaacttattgttgagtaaattataactaatgacatgtttgaataatgtgttagaaaaaaatgaatcttataattgaaaataatatgatcaatttatgatagtgttttcatgttagatataatcaaagtatgaaatcttatatcctaagaatggttatatatggtttagtaggttaagtgtgttttgacaatgatgcataataaggatttaacttggagaaacggtgacgtggacagcttgaagcagacaccccaccagatcgatgtttaagtagtactgaacattcatatgtttgttccaccaaaatatctagttgcaaactatttttctttttgttttataaataaaattaattaattttttaatata

SEQ ID NO: 34 - DNA, 507 bp, Ambrosia trifida
atcccaccgcttttgcgctttgcgcctcggttttggacctcgtcgctttagtgcgcttcgcgctttttaaaaccaagcttctatcgagtttaatgactaaaatttagtaaaatataatgaccaatatggaaggtatttcatgacaattaaccctaaatatattaggtaaccacaaaggagggctctctgttgggaaagcaatatcctccggatgcaaagcagccgaatccgtgattgcatatttggattcttattcggaccagaagtagaaggatgggtgttgctagattatgttttaaccggtaaactttatttcttatatcttatttttattcttatttttcaatgcaaagagtcaaacgacgcaagtgtgatatcaggattggccggagaatgtagatcaaaagagtttttgttcgctcgaggttggataaatttgacgaaaattcgcttttcgttttgtgtttttgaaggtgagcaaggatggtgttgtataaacttattgtt

SEQ ID NO: 35 - DNA, 1648 bp, Chenopodium album
aaccctcaaaagaaaattttcactgcaatctttgtagccttcttgttagcaaaatactcggacaactaatcctagcaacagcgctatttgtttgagtattgtgagaggtaatccactacctcagctgcagattcataagcaccctctatacatcgccccaatgcaacacctgaaacatagttgccaccaagaaacaatcccttgaacccagcatcagttagagctgcttttgcagcatcaagcagatcaaagtggccaatcaaaaattgtggaattgcttggggccatactctcacgcccaaaacccggggatcttttgcattaggatttatgagaatgtttctcaagtccttgtcaactgccccagcaagttcatcttgcgtcttgtgtaatatactagtgtttgtagaacctccaatgtaactcaaaattaaggtcctaccaggtggtgctcgaccagggaaaagcgatgaactataaattgatcccaaggtttcaacaccctgactgcggggatgcaattgcccaaatccttgaagtttaccatcaatcaaacactctgatctaattgcttcactaggataagaaagtgacacagctgcaactggtggatagtagaactttgcaagtgattctgcagcaacatctgaaagtggacgaaggaggctacttgcaatatgtgatgggacagtcatcacaacacttttggtccgtacagaaaccagtccatctggtgtttcataagtcagattatattctccatttggcaacttaacaatactagaaagggtccatgatagtttcactttgctgccaagcctttcagaaatggctgtaggcaacatagtgagtcctttcctgaaggatccaactgtctggcccttaggtttagggaggcgcgggtctcgaggtggctttggattgttctttctttcctggattgttttgagggtaccaccaatgatactaccacccttttgttccaagatccaaactttgccaaaagcagctttcatactcaacttggaaggatcgccagcatacacgcctgaacaaaagggttcaatcaagcgttcaaatacttcatcagcccagattacgacggacaaaatcttcaacagattcctcgtgagctggaggagaaggacgtaagccaagagcaccgagtccagacctaatcttgccagggaagctcataaggtcaaagaaagggaggtcagtgggcttggacggtacaggcctcaatttgccattccacaacacaaaacgaggggcgttaggatctccaaacaccaattcatctttcaatccactgtcaacagccatggtgagcactgcatcagatggctggaagctgttaggtccctcttcccagatatagccatcggcctccacagtagtgatgtttccaccaactcgatctttagcctccgtgacaatgaaatttggggagcgggaggagtattttgtagagagagcttgtgcaatgccaagaccactgattccaccacccacaatcacacagtcaagtacttcagcgccatcgattccaacagtagcagtgtttgtgttctggtaattgactgctgaatttgaggtcgagactgtggagcaacagataatggtgttggtagcattattctgtgaa

SEQ ID NO: 36 - DNA, 1653 bp, Conyza canadensis
cgattcgagttcccggccattgctcgattgcgtggtcgtcggcgccggaattagcggactgtgtatagcgcaagcgttgtcaacgaagcacggcggcgacgtggtcgtgacagaggcgcgtgagagagttggaggaaatatatcgacagttgaaagagatggttatttatgggaagaaggtcctaatagctttcaaccctccgatcctatgcttactatggtggtggacagtggattgaaggatgatttggtgttgggtgatccaactgcacctcggtttgtgttatgggatggtgatctgaagccggtgccttccagtccatctgatttgcctacctttgatctgatgagccttggtgggaaactccgagccggttttggggctcttggaatccgccctccacctccagaccgtgaggaatctgttgaagagtttgtccggcgtaatcttggtgatgaagtttttgaacgtttgattgaaccattttgctcaggtgtttacgcgggggatccatcaaaacttagtatgaaagcagcatttggaaaggtttggaagctggagcaaaatggtggtagcattgttgggggagcatttaaagcaatccaagctaaaaataagagtaccaagcctcctcgagacccgagattaccaacaccgaagggccaaactgttggatcttttaggaagggacaagcaatgttgcctaatgccatctcaaaagggttgggtagcagagtgaagttatcctgggagctcgtaggtatcactaaatctgagaatagagggtatagtttgacatatcgaacaccagatggattggaaagtctgcagactaaaactgttgtcatgactgttccatcctatgtggctagtgacttgttgcgtcctctttcggtggaagcagcagatgctttgtcaaaattttattatcccccggttgcagctgtatctgtttcctatccaaaagaggcaattcgtgcggaccgtttgattgacggtcagctcaagggttttggtcagttgcatccacgaagtcagggcgtggagactctaggtaccatatacagttcgtctcttttccctaaccgtgctccacctggaagggttctgctcctgaactacattggaggggctacaaatcctggtattttatcaaagacggagagtcaaattgttgaagcagttgatcgcgacctacggaagatgctgataaatcctaaagcaggagagccattgaccttaggagtgaaagtgtggcctcgagcgatcccacagtttctgattggtcattatgacattttagaggctgctaaatgtgctcttagtcttgctggataccggggtatgtttcttggagggaactatgtatctggtgtagctttaggtagatgtgtggagaatgcctatgaggttgcagccgatgtaagtaattttttgtcacggggcgtgtacaagtaatacgtcactcttcggaaattagtgtttatgaggttagtaattaaagttttggcacaaggcatgtggaagtgaaaacgcggactttcagtgaagttagtcatctattctcaagcctcatggctaaatgtaattcgagttaatatactaaaaaaaaaagaaaaaaaaacaaaacatgtcggccgcctcggtctcta

SEQ ID NO: 37 - DNA, 600 bp, Conyza canadensis
ttaggtggaatgcagacacttacaaatgcactgagcaaagaagttggacaacatgaacttaatcttcaatccaaggtgcttgaaatgtcctatagctgtgatgataacactactgggaattggtcgatctattgtgctccagatcagaacaaacaattaaatcagcaaccttttgatgctgtgatcatgactgccccacttggcaatgtgaaagaaatgaagattacaaagacaggaagtctgttcctgctcaattttatacctgagcttagttatatgccagtttcagtcataatctctacattcaagaaagagaatgtgaagcggccccttgagggatttggaatgcttgttcctgccaaggagcaggaaaatggtttgaagacgttaggcactctcttttcttccatgatgtttccagatcgtgcccctgaagacttgtatctttataccacctttgttgggggaagtcgaaacaaagaactggccaatgcttcgagggatgagttgaagcagatagtaacttctgacctcagacagttgcttggagcagagggagagccacaatttttgactcactattactggagcaaagcatat

SEQ ID NO: 38 - DNA, 10631 bp, Conyza canadensis
aaaagtatatttaaaattttttgcccacaccaaaaaaaattttaaaaaaaagaagtacatatgcaatcaatgacatgcgatttcaatcccaactttcaaatctcaatttttaaatgctagtagctataagtaaataatctccattctccttctctatacatcttttcttattcaacaggtaatactttcatttattaatcataaaattatacatatatattttccctaatttttaggtttcttaatttcttttgacgtgaattgaaagatgaaaacgtgatgatagattggaagagttgaagaggggttttgttttggggaatctcatacataacacactaaacaacatattatcagttatcttgtattgatttaatataaaatatgagtactaaaataccattatatggatcgtataagtttagtgaatagttcgtgcttttggttatacgacgaaattgtagttggtttattatatcgtcttttgagtttgcattttggttgtaattggatggttattattttgtgggtatatgaatttattggaatttgatcgatatattaaaatttttgtacctatataatgttttaaatttgtcaccttacgataaagttcctggctccgccttgatagcagccttcatgtaaaattggttttcataaacgttctgagtttttataaattttgtaacatgtcattcttctggaaatatgcttctcttcaatttaacgcgtatatgagcgttgcattcgcatataatcgaatgtctcgtggaaagtactaaagacttggccaacgttaggtttcattatcatcttctaggggattgtttaagtccaacataattaagaatttacaaacagaaggaacaacgtaggaaaagtcataatcaattgaatagtttgattagtcaatttatcagtacttaaactaagatatagtaagatgaggttgaaaaacaactactataacatacaaacatatatggatcttccttaaataataacaatgttaaagattactgcaaaaattacagaccttcattttcagcaatgatggtatgaagttgaaataatcgtttgttgttttcaattaacattttttcacaaagggagagagataaatatggtgatcagctttatatttcaatataatgtgaaaggtctgaaaaaaaaatttgaccaagtgtaaaaaatatgttttggataaataaaagttaatttaaataatctactaaaattagcccctggtttacaaatatcatttcacttataatttattaaccataatttactaatttgttcagtcaaacttttttttttatatagtttctttatttaacgtactcacaacacattacaatctctcatattgggtatttttactgctgcattacgtgagtttttttttattgtatcatataatttttgacaaatgatttttaataaaacaaaccttttcactctttaatggtgaggtttcaattccacagtttaatcaattgccgatcgatgtatatatgtaatttttagttttaatttagtaaatacaaaattatttaactagggtataggaagagtagacttgaaaatatgggtgataatttcttgattctttcaatttgagtaagttaaagaaatcttaactcttcaaattttggcctttaatttatatctaaaggttaatttttatctaaaggttaacattactataacttggactaattccctccctaaaaatatatacccattttccttatctgacttggaaaatagtggggtagatcggatctgacctaacctgatttgacccgatccgacccgaacgttgaaaatgaaaattagtttactagaggtggttcacccacagagaaattataccaaaccgaaacaacccaacaatggcttctccaacaacaacaacagatgataacaaaggtagatactatttctttttcttcttaataatcttaatatgttattattttcattgtagataatccagttctgcattttgttgcacagagaaagcacctgctaagagagttgcagttgttggcgccggtgtcaggtcaatgttactactttcatatatataatatatgtatcttgcgttttattttacttcttactttttacggcgaaatacccaaatatcccaccccacggaaggttatgtagactttggttttctttgacctctatagttggttacttgttatggccatgaaatgaaagattcctaaacgagggtggagattactctagcgtttgttttgaccccaaaaatgctttgcttgtcggaggacatgaccaatatttagaggactaggattagcttagcggaatatggtagataagtaatccttttaggggtactttatataattgtggattttcatgcatgatacctttcttatatgctcatatgacttctttgcactgttaggggtagtgttcttgacagctaggtgacctatgctactttgtttcataggtcgattagggattagcacccactatttttttatttttttggaaggcattaaattatattatattaaagataaaaattgccagtaagaaactagccgatacatagactgtccaatccaaaatagaaaactagcacccacattatatgtgggcccaccggtccctaggacttcctagtaaatatctacttatatctatgtatgcatggctgataccaaccctatttgcttttgtgacttgctgggaggaggttaaaggggttcttgacttcttgcacatgccactcgtactaccaaacctatttgcttctatgacttgctgggaggagacatgcccctattaattgttgctctcatcccacatgtttggttctatgcagacggttatatttattatgtttttatgatgtttaatatgttcaaatgtcttatttactatgtattgtccaatttgggctatgtggtatgtcttctacccttgtctactcttaatgtagtaagagtatcatcatactcgatcgacaggtatggttactgaactctttacactctcctacttttgccttttttggatggaggtccttatggaagtagtctttctgcctctgggtagaggcaagactgtctacatctcacatcccccatacccctcgcacaagaattgggtcatgttgtttttgtggactcgaacccagatggtaagatgtttccaatggggtttacatattgttgattttttgctgctagtataatatattattttgattattcgttacatgtatgaaatttgtaaataaattggtgagtatagtagtctagtgcaacatggtgattgattgatatctagaggaatggctggccatattatgttgaatcatgaatgaatgacttggtttgtttcagtgggcttgcggctgcatataagttaaaactacatggaataaatgtcactgtttttgaagccggtgagatagccggagggaaactaagaagcatttcacaaaacggtttaatatgggacgagggtgccaatactatggtatgatatcgatgttagtttgcttatagacataacttctttttttttattttttttaaaaaaaagttgttttgatgctcttttactccgtatttgtagactgagagtgaaccggatgtcagcaggttgcttgatgatcttggtcttcgagataaacaacagtctgtaagttatatgctgttggatatggaacatcatgcttcctgtagcgtgcgtttgaaaatttatttttgcaaatttctcccattgtatactaaatgacatagtataaagaagaggaaattgtttatatcacttttattcgtgttcaaatacggaaggctaaatccactttatgtggctgtggctgtaataatttgtcggctatggttcttgtttcatttatttgttgtggtcatgtgtgtatatgtttaccatggctgaatactacactatatttccttttgcagccactttcccaacataagcgatatattgtaagaaatggaaaaccggtactggtatgatatctcaacaccatgctgaaaactaatcctctgttatatatgaacaaaagagtttaaaagtataagatgaaactttacttcaaaatcattagtagaaattgtgttttattggactcaaattctcaacctcataaacacttgtcatttgtttacaaagttttgtaaactgattttttgttttctgggaatgtaaataattatggcagtttattgtactgttctttcgtatagatagttataaactcaaaacacaaaaaaaaggttgttttattacgcggtcgtagctgtcacaattttagttttcttttgtacttgccaagttcatgtcttatatactgaatgtaacttggccaaactcatgtctgcaggtaccttctaaccccattgcactgatccaaagcagtttgctttccactcaatcaaaggttcgttagtagctcttggatgtttaagtctgaagtatttaaaccgtatccaatcctttcattctcatattatctacccaatgattctcaatgtcaaggctcacaaaaactctttatcctactatgctttaaatttttaataaaaatgatgcatgcccttttcggttgtatttaaaaaattatccaaaattgcaatggtaatatattagcacacgagttacacaaattctttctcattttgatatcagatgatctcaaaattataatttgtacttcattacattgtgtatgtgattatggggtttgttgcaaaaattacagcttcaaatacttttggagccattttcatggaagaagaagaactcgtctgatacacaagaaaggtaatatatagccttctttcctatctatctgttaaaccctattagggactaacttttttatttatttactattttgtagtgttggtgcattctttcaacgtcattttgggaaggaggtatatgtatattgtaacctttatcttcagttcagttattctggtatacgtctttcttttgatattaaggggtccaagttttcatttgtgtggtacttcaaaatttgtccatgctttccgctatcttaattttctatacttaatgtacatatgtaaggttgttgagtatctcattaatcctgttgttgctggaacaagcggtggagatccggagtcactttctgtgagtaactcttccatgtccatgctgcttcatattagtgtggggatatacataactgatttcaattaacaaacaaaaacactttaaagcatgtggaggtgcaaatgcattctttgacacccctgctaagtgctacctctcatcattaaccttctaggttaatctatcaacctcatattttccatacagatgcgctattcattccctgaattatgggatttagagagaaggtatgtaagctacaaaataatatgtaattcattctttaagtgagcttgattatttgttcccatgcaatctactatgattttttattataatatttataaagcttggattcttaaattcaatgtgatgacggtcaaatcaacatgcaggtttggttcactcatttctggggcatttcagtctatgatctcttctcgaggcagaaaaaagagtccttcaggaagcagcaagcgcaggcgtggctccttttcatttttaggtggaatgcaggtaagattggtgattttgtctgtcaagattcatttattggaatctaatatattctttaaagtagaaacaggccatcaatatattgcttactttgttcttttaaatctttattctcatgcagacacttacaaatgcactgagcaaagaagttggacaacatgaacttaatcttcaatccaaggtgcttgaaatgtcctatagctgtgatgataacactactgggagttggtcgatctattgtgctccagatcagaacaaacaattaaatcagcaaccttttgatgctgtgatcatgactgtgagtatagttgtgttatcttacggtgacattgacataaatttggttaatgttttgcattttgacaagactagtttgtctcagcaacttttttttgtgctatcttggtggatctggattcatcaaatattcaaatctgtggacaaaatatggaaattcttattctctatttcagaaataggagaattattgtttatacacccatttgttttaatgcttattagtttgtaagtgcaattagaacgtaattaacacagtacatgctcccgaattaggccccacttggcaatgtgaaagaaatgaagattacaaagacaggaagtccgttcctgctcaattttatacctgaggtatgttattgtaccgtgtgagttctatcatatggaattcgtgcagaaccccttagttttagctcttttgaaatttaaacaataatctttaccatggggagatatcctttaaaggaatattttctggtttttataatgcagcttagttatatgccagtttcagtcataatctctacattcaagaaagagaatgtgaagcggccccttgagggatttggaatgcttgttcctgccaaggagcaggaaaatggtttgaagacgttaggtaaagcttgcctgtgtattatcttttttttttttttccttttcatttttttttcttttttttttctttattgtctataattattattgaaaattctgttatgcaggcactctcttttcttccatgatgtttccagatcgtgcccctgaagacttgtatctttataccacctttgttgggggaagtcgaaacaaagaactggccaatgcttcgaggtaggcttgatcattgcaataatttctgctcaatattttagcttcaaatttactcaagtattgaggaagtagttgtataatggctgtctctaaaaacttcataagagaatcttcttgaccattccctataggaatatcaatctattatttatgatgattatgatgagtaagtaataatttagtttggaaacttttttggaggaaaggagaaatgttggagctttcttgttgctgtttaaggggagaggacataactcaagtataattcttgcaataatatatattttctgtaaatacagggatgagttgaagcagatagtaacttctgacctcagacagttgcttggagcagagggagagccacaatttttgacgtaaggacacattctagctctgctgcttttattaaacgttagtttatctagatcaaaggattgcaagaattgcattcctgagcactatacaaacaattacacaacttaattttcagcttagactttttcattggcgcatgttcaccaattgaaattgtttcttgaaatttaacttttttttaaaagcccgaggttcacagatacttttacaatgtacaagtagcttatgcttaatttgtcttgtgtttttttgttcatgtcatacatgataatgatgtagtttaattgcagtcactattactggagcaaagcatatccattgtacgggcgtgactatggcttagttatggaagcaattgagaagatggaaagagagctacctggttacttttatgcgggtaaacctttttgtgtttgaaataaagtagatatatacatatctatactcccttataaagagtattagatttcttaaaattaagcattttttttcttcctaaaatacccctacttatacataaaacctttatatatcatcctttcccacattgtctctaatcattacacgctctcatcgaccttttatcacccttcgccaccgccctcctccaccgcctctctcgatctccaccaccgtcttccatcaccttttagccgctacaacgcgcgggcattatgctcgttttaaaaaagcaagttaaaaaggatagtaggttgataagaatgactaaatgaggacaaatctattaggtaaccacaaaggaggacttgcagttggaaaagcaatatcctctggatgcgaagcagccgaatctgtgatttcatatttggattcatattccgatgagaagcgttgctagatgttgtggtaatactatttatgatacaaaaatgaatgaaattctgagcctgaaccatataatcctgcattttcttaattattattcaaagtgcaagacttttcaggtacgtgtacatctcaagaagttttctttccatcgggattggataaatatggcgaaaaaatagtgtggctttttccggtgtctttgaatgtagtcgaaggactaagctttagttacttttataatgcaataataatggatcaaagtgttgtagaaattgatcgttccggatgatgttaaacattgcaaaatgttgtaacaaaacatggggctcgggttttgcttaatttgcatctgtaacaaaggctcgccatttttgggtatacttttaactatctgtctcaaccaaatagtttaaataaacgtgcttgaattagttgtacttttattataaatagttaggggatgaacttttgatatagaatatacaaattttctattcaagttaattatagccgttagaaaaatccctaaataaaagccaatcaggttttaggttttttttttttcttgaaaagttttccattattttaagggttattccttgatggtgagccatttttgctcgttatagcggtctaaatagattttacctgtgaccggtgttatccattcacatggtcacctccaaaatatgcttaaggacatattcgaacttgaaatcttttgtgaggaaacatataattctttcgggttttgctaaacaaagctcaatgggtgtgcattaaatagttgtacacttaccataaaaatcaggggtgagcttttgatatgaaaaagtacaacttttttatgtactataagtgaaaccctaagggctttatttaacattttccaattctttatcactagataaacttgatgatggttagcttctttttttttcctaaacataggtgtcttactcacttagactagacccaaaagttgactcgctttgcgagcccaagtcagagtaggtaagtctctctttgggtcactagagtatttttcttaaggagtttcatccttttagagacatccccaatcaatggacctccaccctagtgttttggttggttaataatttagtattattatccctgttatatattcttacaagaggttttagattaaaacattttaggtaatattttaggagtggttagaaaagggttgatcggagaggatgtaaaatattgttacgcaaggggtcagagtggaaagataaaggccggtatagtctttcataggagtttgtgtcctcgaaattcacccaagaactttgtctttgtgctgtcgtacctttttctttttctttcccttttgtctgttactactccgtattaactgacgttttaatattgtttagcttaactaaatagattattggaggattagtatttgttgtttagtcattaattgaaggtgaatcaagatccgaataaatgaatctaaaacctatttgcttagtcataaatcttcaagaaaagatgaattgttttgcttaattttaatccttaaagcaaacatgaattgaactcttaataaaaaagagctaggtatttatgacggttattggctgctttaattaagctctttgtctgcatatcccgagtctatccaaatcatcaccccattatgctgtcggtgcttttaggacaaaatcattagtgttaagttcagtcttttaaaaccgttataaagctacaaatattagattcatcttctctacagagaggtgtatcttacattcttacacttaaaacggataaacagatgaattttttcttattttggtaattttttcgaactttttcactagtcgcttctaagattgtatataatgagattcgaacttgagacacccaattaaggatttgtgcctcgtaaatacatgagctgaagttaaagccaaatcactcttttcacttctaatacctagtagcatattcatcattcattataaaattttacacgttatagttgttcaattatttatagtcgtcattaacatctgtttgagaagttcatcaatttccagtacactggtaatcacttaaaaataattggagtcgtctgtagtcccccctcatatgtgagtactttttaaattcaagaggacccatagatctttaactacatttattgatttatacattatttcatatagcattttctgcagatacgatttgttatgtagcaacatagacccatgttcagtccaaacatactagtacaattttggagcaatgcaataatgagtatctaaagtttcatgtgagaataatcaattacttagacactagacgttttttaacaatcagtttgttcctggtacattggcaccaactcgtctgagccttcagcgcgttggccagcaagtagtttcggtttggtggtcactgtcgagcaattgggcacgttaagtattttttttacattttttatttcatatgtatctctgtgtgggtgggttgtaggtgatgtgaagaaggcgataggtcttatattagttttagaaagttttttttaaaaaaaatcctattctttaatgtaa

SEQ ID NO: 39 - DNA, 10185 bp, Conyza canadensis
atttttttatttaaaagtatatttaaaattttttgcccacaccaaaaaaaaatttaaaaaaaaagaagtacatatgcaatcaatgacatgcgatttcaatcccaactttcaaatctcaatttttaaatgctagtagctataagtaaataatctccattctccttctctatacatcttttcttattcaacaggtaatactttcatttattaatcataaaattatacatatatattttccctaatttttaggtttcttaatttcttttgacgtgaattgaaagatgaaaacgtgatgatagattggaagagccgaagaggggttttgttttggggaatctcacacataacacactaaacaacatattatcagttatcttgtattgatttaatataaaatatgagtactaaaataccattatatggatcgtataagtttagtgaatagttcgtgcttttggttatacgacgaaattgtagttgatttattatatcgtcttttgagtttgcattttggttgtaattggatggttattattttgtgggtatatgaatttattggaatttgatcgatatattaaaatttttgtacctatataatgttttaaatttgtcaccttacgataaagttcctggctctgccttgatagcagccttcatgtaaaattggttttcataaacgttctgagtttttataaattttgtaacatgtcattcttctggaaatatgcttctcttcaatttaacgcgtatatgagcgttgcattcgcatataatcgaatgtctcgtggaaagtactaaagacttggccaacgttaggtttcattatcatcttctgggggattgtttaagtccaacataattaagaattttcaaacagaaggaacaacataggaaaagtcataatcaactgaatagtttgattagtcaatttatcagtacttaaactaagatatagtaagatgaggttgaaaaacaactactataacatacaaacatatatggatcttccttaaataataacaatgttaaagattactgcaaaaattacagaccttcattttcagcaatgatggtatgaagttgaaataatcgtttgttgttttcaattaacattttttcacaaagggagagagataactatggtgatcagctttatatttcaatataatgtgaaaggtctgagaaaaaaatttgaccaagtgtaaaaaatgtgttttggataaataaaagttaatttaaataatctactaaaattagcccctggtttacaaatatcatttcacttataatttattaaccataatttactaatttgttcagtcaaactttttttttttatatagtttctttatttaacgtactcacaacacattacaatctctcatgttgggtatttttactgctgcattacgtgagtttttttttattgtatcatataatttttgacagatgatttttaataaaacaaaccttttcactctttaatggtgaggtttcaactccacagtttaatcaattgccgatcgatgtatatatgtaatttttagttttgatttagtaaatacagaattatttaactagggtataggaagagtagaagacttgaaaatatgggtgataatttcttgattctttcaatttgagtaagttaaaagaaatcttaactcttcaaattttagcatttaatttttatctaaaggttaagattaccataatttggactaatcccctccctaaaaatatatacccattttccttatttgacttggaaaatagtggggtagatcggatctgacctaacctgatttgacccgatccgacccgaacgttgaaaatgaaaattagtttactagaggtggttcacccacagagaagttataccaaaccgaaacaacccaacaatggcttctccaacaacaactacagatgataacaaaggtagatactatttctttttcttcttaataatcttaatatgttattattttcattgtagataatccagttctgcattttgttgcacagagaaagcacctgctaagagagttgcagttgttggtgccggtgtcaggtcaatgttactactttcatatatataatatatgtatcttgcgttttattttacttcttactttttacggcgaaatacccaaatatcccaccccacggaaggttatgtagactttggttttctttgacctctatagttggttacttgttatggccatgaaatgaaagattcctaaacgagggtggagattactctagcgtttgttttgaccccaaaaatgctttgcttgtcggaggacatgaccaatatttggaggactaggattagcttagcggaatatggtagataagtaatccttttaggggtactttatataattgtggattgtcatgcatgatacctttcttatatgctcatatgacttctttgcactgttaggggtagtgttctcgacagctaggtgacctatgctactttgtttcataggtcgattagggattagcacccactatttttttattttttggaaggcattaaattatattatattaaagataaaaattgccagtaagaaactagccgatacatagactgtccaatccaaaatagaaaactagcacccacattatatgtgggcccaccggtccctaggacttcctagtaaatatctacttatatctatgtatgcatggctgataccaaccctatttgcttttgtgacttgctgggaggaggttaaaggggttcttgacttcttgcacatgccactcgtactaccaaacctatttgcttctatgacttgctgggaggagacatgcccctattaattgttgctctcatcccacatgtttggttctatgcagacggttatatttattatgtttttatgatgtttaatatgttcaaatgtcttatttactatgtattgtccaatttgggctatgtggtatgtcttctacccttgtctactcttaatgtagtaagagtatcatgatactcggtcgacaggtatggttactgaactctttacactctcctacttttgccttttttggatggaggtccttatggaagtagtctttctgcctctgggtagaggcaagactgtctacatctcacatcccccatacccctcgcacaagaattgggtcatgttgtttttgtggactcgaacccagatggtaagatgtttccaatggggtttacatattgttgattttttgctgctagtataatatattattttgattattcgttacatgtatgaaatttgtaaataaattggtgagtatagtagtctagtgcaacatggtgattgattgatatctagaggaatggccggccatattatgttgaatcatgaatgaatgacttggtttgtttcagtgggcttgcggctgcatataagttaaaactacatggaataaatgtcactgtttttgaagccggtgagatagccggagggaaactaagaagcatttcacaaaacggtttaatatgggacgagggtgccaatactatggtatgatatcgatgttagtttgcttatagatatagacataacttacttctttttttttattttttttaaaaaaaagttgttttgatgctcttttactccgtatttgtagactgagagtgaaccggatgtcagcaggttgcttgatgatcttggtcttcgagataaacaacagtctgtaagttatatgctgttggatatggaacatcatgcttcctgtagcgtgcgtttgaaaatttatttttgcaaatttctcccattgtatactaaatgacatagtataaagaagaggaaattgtttatatcacttttattcgtgttcaaatacggaaggctaaatccactttatgtggctgtggctgtaataatttgtcggctatggttcttgtttcatttatttgttgtggtcatgtgtgtatatgtttaccatggctgaatactacactatatttccttttgcagccactttcccaacataagcgatatattgtaagaaatggaaaaccggtactggtatgatatctcaacaccatgctgaaaactaatcctctgttatatatgaacaaaagagtttaaaagtataagatgaaactttacttcaaaatcattagtagaaattgtgttttattggactcaaattctcaacctcataaacacttgtcatttgtttacaaagttttgtaaactgattttggttttctgggaatgtaaataattatggcagtttattgtactgttctttcgtatagatagttataaactcaaaacacaaaaaaaaaggttgttttattacgcggtcgtagctgtcacaattttagttttcttttgtacttgccaagttcatgtcttatatactgaatgtaacttggccaaactcatgtctgcaggtaccttctaaccccattgcactgatccaaagcagtttgctttccactcaatcaaaggttcgttagtagctcttggatgtttaagtctgaagtatttaaaccgtatccaatcctttcattctcatattatctacccaatgattctcaatgtcaaggctcacaaaaactctttatcctactatgctttaaatttttaataaaaatgatgcatgcccttttcggttgtatttaaaaaattatccaaaattgcaatggtaatatattagcacacgagttacacaaattctttctcattttgatatcagatgatctcaaaattataatttgtacttcattacattgtgtatgtgattatggggtttgttgcaaaaattacagcttcaaatacttttggagccattttcatggaagaagaagaactcgtctgatacacaagaaaggtaatatatagccttctttcctatctatctgttaaaccctattagggactaactttttatttatttactattttgtagtgttggtgcattctttcaacgtcattttgggaaggaggtatatgtatattgtaacctttatcttcagttcagttattctggtatacgtctttcttttgatattaaggggtccaagttttcatttgtgtggtacttcaaaatttgtccatgctttccgctatcttaattttctatacttaatgtacatatgtaaggttgttgagtatctcattaatcctgttgttgctggaacaagcggtggagatccggagtcactttctgtgagtaactcttccatgtccatgctgcttcatattagtgtggggatatacataactgatttcaattaacaaacaaaaacactttaaagcatgtggaggtgcaaatgcattctttgacacccctgctaagtgctacctctcatcattaaccttctaggttaatctatcaacctcatattttccatacagatgcgctattcattccctgaattatgggatttagagagaaggtatgtaagctacaaaataatatgtaattcattctttaagtgagcttgattatttgttcccatgcaatctactatgattttttattataatatttataaagcttggattcttaaattcaatgtgatgatggtcaaatcaacatgcaggtttggttcactcatttctggggcatttcagtctatgatctcttctcgaggcagaaaaaagagtccttcaggaagcagcaagcgcaggcgtggctccttttcatttttaggtggaatgcaggtaagattggtgattttgtctgtcaagattcatttattggaatctaatatattctttaaagtagaaacaggccatcaatatattgcttactttgttcttttaaatctttattctcatgcagacacttacaaatgcactgagcaaagaagttggacaacatgaacttaatcttcaatccaaggtgcttgaaatgtcctatagctgtgatgataacactactgggaattggtcgatctattgtgctccagatcagaacaaacaattaaatcagcaaccttttgatgctgtgatcatgactgtgagtatagttgtgttatcttacggtgacattgacataaatttggttaatgttttgcattttgacaagactagtttgtctcagcaacttttttttgtgctatcttggtggatctggattcatcaaatattcaaatctgtggacaaaatatggaaattcttattctctatttcagaaataggagaattattgtttatacacccatttgttttaatgcttattagtttgtaagtgcaattagaacgtaattaacacagtacatgctcccgaattaggccccacttggcaatgtgaaagaaatgaagattacaaagacaggaagtctgttcctgctcaattttatacctgaggtatgttattgtaccgtgtgagttctatcatatggaattcgtgcagaaccccttagttttagctcttttgaaatttaaacaataatctttaccatggggagatatcctttaaaggaatattttctggtttttataatgcagcttagttatatgccagtttcagtcataatctctacattcaagaaagagaatgtgaagcggccccttgagggatttggaatgcttgttcctgccaaggagcaggaaaatggtttgaagacgttaggtaaagcttgcctgtgtattatcttttttttttttttccttttcatttttttttcatttttttttctttattgtctataattattattgaaaattctgttatgcaggcactctcttttcttccatgatgtttccagatcgtgcccctgaagacttgtatctttataccacctttgttgggggaagtcgaaacaaagaactggccaatgcttcgaggtaggcttgatcattgcaataatttctgctcaatattttagcttcaaatttactcaagtattgaggaagtagttgtataatggctgtctctaaaaacttcataagagaatcttcttgaccattccctataggaatatcaatctattatttatgatgattatgatgagtaagtaataatttagtttggaaacttttttggaggaaaggagaaatgttggagctttcttgttgctgtttaaggggagaggacataactcaagtataattcttgcaataatatatattttctgtaaatacagggatgagttgaagcagatagtaacttctgacctcagacagttgcttggagcagagggagagccacaatttttgacgtaaggacacattctagctctgctgcttttattaaacgttagtttatctagatcaaaggattgcaagaattgcattcctgagcactatacaaacaattacacaacttaattttcagcttagactttttcattggcgcatgttcaccaattgaaattgtttcttgaaatttaacttttttttaaaagcccgaggttcacagatacttgtacaatgtacaagtagcttatgcttaatttgtcttgtgtttttttgttcatgtcatacatgataatgatgtagtttaattgcagtcactattactggagcaaagcatatccattgtacgggcgtgactatggcttagttatggaagcaattgagaagatggaaagagagctacctggttacttttatgcgggtaaacctttttgtgtttgaaataaagtagatatatacatatctatactcccttataaagagtattagatttcttaaaattaagcattttttttcttcctaaaatacccctacttatacataaaacctttatatatcatcctttcccacattgtctctaatcattacacgctctcctcgaccttctatcaccctccgccgccgccctccttctccaccaccgccctcgatctccaccaccgcctcccttttatattgtcatcgccttttagccgttgcaacgcgcggacactatgctcgtattaaaagtagtaacgtaataaacataaagtttacgtaaagtttatatatttcattattttgttatgattttgtactgatgaatatatatttaagctaaaatcattcactctagagtgtaagtcgaacgggtccaaactgaactaaactatttgtctatggtagtcaaattcttaatctttttggtatcgatcgttgtgtagtgttgcacacctcacttgatattagttttatgtgattatatatggttaatttaatttttctttgatttttgatcatggtcttaaatatcattaaaggtgaagaaacatgtgaagagggataaatttggagaaagaatggcatcactaaaacagatagtgtcaccctatggcaaggttagtccttctttaagtttattaattatatgtaatttgtttgattaggtatatcatatatgtatactagttgttttgatttccaatctatacaagtaggattttgctaaacatagttgtaagggttatagttacaacacaatagaatggtatacatacattatatatatataaagatatataactgtttattaataataatctttaaccgtcatgtaaaccaatttactttgctttatccatatccttaaaggctatgaatagcatagtcgatgtaagtatatggttgcttagacggtgtgttaatgttgatcgtacaggagtctagacttggaccattgtgttttagagaagaagggaatcgaacgcaaaggtaaaacttcctttatttttaagagcatagttataatatcattcaaatttaaccaacaatttctgttacatacatcgaaataggcttgattactcatacctatagagatgagtgacatgtgtgtatgaagatttatatattgaattgtaggatatcattttcccatttctaatgtactagttaattatggtttgcggtttttttctttgttgtatgtccattacaaaattacagttggacatcttcttggtggaattcagatgatataaaatagttaattttaccaaacactacatcattggtagagagaaattagaacgtagataaatggtttgtaagtttcaaaagagatactcgtattacataaaatgttgtcttttgcaattcgcagatttccaattacaacagatttgacacaatgttctattatttgttaatccaaccatgaaccactaataaaacagtacaaacatcttgaataaaaaaaagccaccaatacattattgattgttgtatgctttttgtctccatataatgaccagtaatatcaaaaaacatgtattttattcttattctagcttaaaaaggttcaaaaatgcacatccaactttctctcttctttccaatcatagcttttcaaattaaaagcatacacgtaaaagaaacatatggatgtagattgatatgtgtgtggggggtagttggttaaccatgtcacgtgctctgcatcacctcccatccttggaccccaatttgttttttgtacctactacatatttaagtaactttatggcacctcaccaaaaaccaaccaaacaaaccaaactcccaactatacatcacttaattgcacacacacatatacctcaacaagtacttacatctctcccagatttctgtcattccaattttcttgtttttaatcacaattttgttgttgttgtcaatgtctgtctcttttcaaaccagctaaaaaaagaagcaaattcttgatttgattcagctgttgttccacttgtttatggttagtctttctcattctttcaccccccaagtttaaatctttgagttaatttcttcaaattcctgtgttttttgaaccgggtttttatcagttttgttgagtttagcaaaaaagtagagttgggtatgtaaagattgaatctttttactgggtttatgtaatttctttgaaatttataagtttcttgcaatgggtatatgattttctattgattgaagtggttaataacaggatttggtgagtaaagtttgaatctttcgagttatggatttatgtcataccttttcttgcccttcaaaataaagtcaaagctttagttttgtgatttgactttggtatcccttcaaaataaagtcaaagctttagttttgtgatttgactttggtatgctgttgctcccatgaatattttcatgctgtttgtaaattgtaatatatattttgataaattcaattttgttatatttgtttcctgataaagttttaatgtgattagtgattacttcaatttgatgagttc

SEQ ID NO: 40 - DNA, 2634 bp, Conyza canadensis
cgtcaccatactgccacggtcgccacaccttcgtctctatcactatcaccgtcgcatcgcacggacatcatctagtcaatatttatttatgaggaatggagatatatctatactttcatattaaattaaactgcctatttttttcaactattctacctttgaaatgcctattataccctcctataaacaactatccattctactcttttaattgattttctcgtactacccttccatctatttcccaatacttatccctaatctctaatcccctcctctcttgctgtcgccgaaaacctaatagaaaaattagtttcatttctacggcaactaccataaacctacaaaaagattggttttatctctccctcaccaccaccaccacaaatcacccattccttacaagctctcaaatcggttaggtgattttccattgaaatcgcttgtttttattttattttattatatctaatttcctaatttaaatccattgtttttgtatttttcccaattttctttttgaatttggtttgggttaatgttctgatcatccatgtattttgttcgtacattcacaaaagaaaaaggtaccgacacatttaatgatcacttttttaaaggtaccgtcgcatcatgtgggtacccatctagctagttgatgaataaattattagtattgttaaatttaagttttttgtttaatgagtaatttaagagtatgtttaaatttgggttaaaaaaaaaagaaaaaaaaagtaaatgtgtattgatttgtaagttgtaaccgtctaatattataaaaagaaaaagagaaaccactcctatataaaacagtcaagcctcttgtatcattaaccgggttgatttaagagcgaactttgatcgaattttgggttttcgaatttgctttccatccacatcgatatctgcccaagtaagaaaccctcgttcctgtctctctttaatttacatctccatgtgcttttcgatcctaattataaatatgcggataaccgcagcattactacccgacgcccaaaggaagaggaaaaagtcgtcgtcaaaggcagatcaacaaatattgatatattgataataatgtaatagaatatgagaggcttccagccaagtccgcatgtcgtttcaagtctgtttccaaacactggaattcgttcctatccacacgtatgtttggaccaccagctccatcacatgaacaaatcctataaacttctcttacttgaccagctagccccctgtagataaggatttatgcagcaaacccctcaaccacgtacggttccattaccgtcggttttaatcgactggaggaagccgatcctagatttaattcgcttgtaggatggattggtatgtgtagccgatccttgatctatatttcaatttcactggctaggtgtaggcattattattaagcaatgtgatcgattgatggctaattcaggcgtttgaattcaacttttcattagtcaagtaattattctcaagtttatatattaatagtatatatacgatatcatagtataatatacaaaataaaatctatccaaaaggaataaaatctttggaaaggaataaaatctatccaaaaagaataaaatctatccaaaaggaataaaatctttctaaagatttcggacattcactataaatagtgacagcagatgagatggaaagaaaaaaagaaaaaaaggaacaagaatactcctttggagagaatacttgaactctcatccctcaaatcattgttaacataatcactaccctcataggattggatggcgtaaaaccgtatacgtaatacggttaccagcagggatcgccacccaaatatcctaatcttcctcacaccttcccatgctaggtggcatgggacccacataactctctttatttatataatgatattagattacatactccttgaaccgtaagtgttaatcgacgtatcatcatatatacactaatatctatgttaaataattaataaacaaaatatgacacataaaatttttgcgagatatttttggcgaagcattgcacaaaaagcagcaaggctaggatatttttggcccacaatgtaccgcgatgcaacaaagattgtcgacaattgtgataattgccaatgccatgctcctatcatacgtcaaccccaacacgacttgacaagtatttcaagtccatggccgttctatcaatggggaacagatatcgtaggaccattcccagaagcaccaggaaaagtgaaatttttggtagtcgcaatcgactattttactaaattggcagaagcagagccactggcaacaataactggacataaaatactcaagttcgtatggcgcaacattgtatgtcgttatggaattccaggaattatcatcagtgacaacggaaagcaattcgcaaataacccatttcgggagtggtgtgaagagcttaaaataagacaacaattcacttcagtcgcacacaggtcaaacagaggtaactaaccgcaccatcctacaaggcctcaaaacaaggctaaacaaggcaaaaggacaatgggtagaggagttaccaaacgtcttatgggcatacagaataacagcgaaaacggctacgggttgc

SEQ ID NO: 41 - DNA, 1631 bp, Euphorbia heterophylla
attgcgtgattgtaggaggtggaatcactggtctctgcattgctcaggcacttgccactaagcaccggaatgttgctcccaacgttattgtcaccgaggctagagatcgcgtcggtggcaacatcaacaccgttgaaagggacggctatctctgggaagaggggcctaacagtttccagccctccgatcctatgctaaccatggcggtggatagtggtttgaaggatgacctagttttgggggatcctacagcgccacggtttgtattgtgggatgggcaattgaggccagttccttctaagccaagtgacttgccgttctttgatttgatgagcattggtggaaaactcagagctggttttggtgctcttggacttcggcctccacctccaggacgtgaggaatcagttgaagagtttgtgcgccgcaaccttggagatgaagttttcgagcgtttgattgagccattttgttcaggtgtttatgcaggtgatcctgcaaaactcagcatgaaagcagcattcggaaaagtttggatgctggaacaaaatggaggcagtatcattggtggcacttttaaagcaatccaggaaaggaataaaaatcccaagcctcctcgagacccgcgtctaccaaaaccaaagggccaaacagtagggtcttttaggaagggactgactatgcttccagaggcaattgcatcaagtttgggtagtaatatcaagttatcttggaagcttctgggtatctctaaattggacaatcgggagtacagtttaacatatgaaacacctgaaggatcagttactgtgcagagcaagagtgtcgtacttacaattccatcccatattgccagcaatatcctgaatcctctttctacaactgctgctgaggcactgtcaaaattttattacccaccagtagctgctgtgtctatttcatacccgaaagatgcaattcggacagaacgtttaatagatggcgagcttaagggatttggtcagttgcatcctcgtagtcaaggagtggaaactttaggaaccatatacagctcatcacttttccctaaccgagcaccagatggaagaattttgctcttgaattacattgggggtgctaccaatcctggaatattggccaagaaagacagcgaacttgttgaagcagttgaccgtgatctgcgaaagatgctcataaatcccaatgcaaaggatccacttacacttggcgtaagagtgtggcctcaagccattccacagtttctgattggtcactacgatatcctagatacggcgaaaaatgcgttaagtgaacaaggcttggaagggctgtttttagggggtaactatgtgtatggtgtagctttgggaaaatgtgttgaaggagcatatgaaactgcgtccagtgttactaatttcctaacccagtatacttataaatagtatctgatgagatttaagcaagagttcaattatgctgcggctaagtactgtgagtttattgagtagtgggtaaaaatgttgctttaggtctgttgtatttgtaatagttgcttcacgtttttcattaaggatggtgtattctctagttatgcattcttgttcatttatcaggcaaaacgagtttgatgt

SEQ ID NO: 42 - DNA, 480 bp, Euphorbia heterophylla
acaggttgtgcattccacccagaaacgtcagcgtggttcattttcgtttctgggtggaatgcagactcttcctgacaggttgtgcaaagagcttgcaaaagacgagcttagacttgagtcaaaggttttgtctttgtcttataatcacgattctagatcggcgttagacaattggtctgtctcttttgcttctaagggcaacaaacgtatgcaagactcgtcatatgatgccgtcattatgacggcaccactttgcaacctcaaagaaatgaggatcacaaaaggcagaaatcacttcctgttggactttattcccgaggtaatttatatgccactgtcggtcattattacgacgttcaagaaggagaatgtcaagcaacccctcgaaggttttggagttcttgtaccttctaaggagcaacaaaatggtctaaaaacgcttggcacactgttttcgtctatgatgtttcctgaccgtgc

SEQ ID NO: 43 - DNA, 4067 bp, Euphorbia heterophylla
tttattgtgtaataattaaaggataatattactgtaaaataatttatattatttaatataataattttaatattattatttttccttaaaagaattataaatgagcttgtaatgttcatgaacaatccatgaataagccaattgttaaatagaccattcatgaatatgcattttgagctcgaattaaactcagcttatttacattgttgtacatgtgaaatcaagagaatgctcataaagtgagtattaaaccgaaacattttatatttcttaaaggtctgacacatgaattctgagaaatcaaatctgtaatattttgacaaatgaaataaatcgtaaaatacatatattcattttagtaaaatctctaaatttttaattctttcaatcttaacatcttcttcctcaaatccttgtaacaaatcacagcacaatattttagcattcaaattcatagaatataattaaccgttcaaatctaccaatcccacctccttacccacagcttctactccgagtccattcattaaccctcctctctttgttacaaattcttccatgtcttatttttactaaaatctatgctatctatgtttcctaaaattattccacctgctttcagttttaataaaacttcagatactttgaagaactccaacactccattaaatgagaccaagtttcgcaagtcgggctaccctttgttgggcccaagcgcaatttggacacctattttttactaagttcggcttaagcctcagcccgtcaaaatttaaagttttatgcgttgagctgggttttttacaattatccgagcctaatccgataaataataatttaattttttttatatattatatattgtactaaataattatttcaatatttatatttcaaagttatgggtgtgcatctggttaaaacctaatagaatcgaataaatcgaatatcaaatagagaaaccaaaccaaatacgaatcaaaatcgaattaaccaaatcaaaaataaattattccgtttggttaaaaaccgaaccaaaccaaatttttttaaaaaacaaacttaaattaaaaattttaactcttaaaatccaaaaataagtattacaatagttcaaatgacttagttttgacacataaatgaatgagggtgcattttggggtttgatgttaaaatgatctatatttgagcattattagtagaatattttaaatttttattatgatatttcaattcgattcggttattgtagttttttcaacactaaaactgaactgaaaattgaaatgtttaactttaataaataaaccgaaccgaattttcaaagtaaccgaaccaaattaataactcagtcttattcgattcggaaatgtagttaccaaaaccatttgcacacccatattttacactaatgaatttttaaacttaaatacaataaattgtataaattattaaaaatttcaaataaataatataatcatacgtaattttgtcaatttatttcttaaaatctataaaaaaaaaagttattaaaatactatctacagcctttggaaatgattccataagcctgatccgagcacggagttctaaaatacggattgaagcagacttggaatgatacttttgtcgaaagcccacaaagtctggcctgttcgattaacatgtcaaaacaatagaagaaaatatctttttattttcgtgtaaatgaatttaccagtaaggttgcgtttatcatttgtagccttcgtccaatcagattgacacgctatatttctccttgtcaattgaagataacacagcactatttccctattagttctgaggccgccactaaacggagtgcgcttgcctcttaccaccacctttcgccgccatggcctctatttccgacttgtctcttttccggccaacaccttctcttgttccatcattttccaaacgcaatttaaacaactctatccacaaacaattcaaactccgatgctcaattacagagcagccttccacaatttccccatccaatcccggagacaaatccttatccggcaacggacattccgcctcagtagattgcgtgattgtaggaggtggaatcactggtctctgcattgctcaggcacttgccactaagcaccggaatgttgctcccaacgttattgtcaccgaggctagagatcgcgtcggtggcaacatcaacaccgttgaaagggacggctatctctgggaagaggggcctaacagtttccagccctccgatcctatgctaaccatggcggtgaggatccaatttctaattgattgtcatgtctaacaaattattgacgaaatttgcttgtaattggagattttggttgaattagctaatttgatcgtattgtaggtggatagtggtttgaaggatgacctagttttgggggatcctactgcgccacggtttgtattgtgggatgggcaattgaggccagttccttctaagccaagtgacttgccgttctttgatttgatgagcattggtggaaaactcagagctggttttggtgctcttggacttcggcctccacctccagtttgtcctctttaactttcttattgtaattgttctccgattgaaaatagtcccccgtgtgtaattttatctgctcgtaaccttacaattctgctgaaagtgacagggacgtgaggaatcagttgaagagtttgtgcgccgcaaccttggagatgaagttttcgagcgtttgattgagccattttgttcaggtaagttaagatatttggagcttgtagtgttcttattagttgacactgtatcatgtcaagttgtgttatcagacccattacaacatcttaccaatcatcacatgaatattgctgtatttcccatgtaaaattaaaccgatacaacatacctcgacttaaattgacgaatacaattcaatgtagtggtacttagttgacgtcccttttggttcgacgacctcttttaattatgatatgttgtgttatatctaaacactaaattatgaatttcattcaaaatctatgccattgttaatacaaatcattatcaaacttgaagtgaattccattattgaagtttatattgcatgctcaatctcatccatctgatatttgattcatttatttaagtagtcctttagcgtgcatatcgtgaatggttccttgagatgtgcttttgatcatgtagcatccatcatggtgatggcttatttgttctagctatatataagatgataagagaatgactaaatgggtaacttgtctatgctgtccagaggtgtttaattgctttgcagtatctgaaaaagagtcagttggtttccctatgatgtatgcttctcaaacttaaaatcgccctagttgattttgttgctaaattcggaagttttatttgtataatttgtatatcttgacaaggttgtccttaatgggagatgctatttttcatgtgcaggtgtttatgcaggtgatcctgcaaaactcagcatgaaagcagcattcggaaaagtttggatgctggaacaaaatggaggcagtatcattggtggcacttttaaagcaatccaggaaaggaataaaaatcccaagcctcctcgagacccgtatatttatctccttgctttgagaatatcttacatcttttgtttttgttgagtttcttgactctagtgccctgcaggcgtctaccaaaaccaaagggccaaacagtagggtcttttaggaagggactgactatgcttccagaggcaattgcatcaaggtaacatttccaccggaattaaaattttatgaactttagatggttgtaataattcttgacagtggctgaagtaattgactgattacctgcattggtgttgcagtttgggtagtaatatcaagttatcttggaagcttctgggtatctctaaattggacaatcgggagtacagtttaacatatgaaacacctgaaggatcagttactgtgcagagcaagagtgtcgtacttacaattccatcccatattgccagcaatatcctgaatcctctttctgtatgtttttc

SEQ ID NO: 44 - DNA, 2630 bp, Euphorbia heterophylla
tacactaataaatttttaaatttaaatacaataaattgtataatcatatataaatttatcaatttatttctttaaaatctataaaaaaaagttaataaaatactatctacagcccttggaaatgattccataaacctaatccgagtacggagttctaaaatacggattgaaccagacttggaataatacttttgtcgaaagcccagaaagtctgggtccgctcgattaacatgtcaaaacaatagaagaaaatatctttttattttcgtgtaaatgaatttaccagtaaggttgcgtttatcatttgtagccttcgtccaatcagattgacacgctatatttctccttgtcaattgaagataacacagcactatttccctattagttctgaggccgccactaaacggcggtgcgcttgcctcttaccaccacctttcgccgccatggcctctatttccgacttgtctcttttccggccaacaccttctcttgttccatcattttccaaacgcaatttaaacaactctatccacaaacaattcaaactccgatgctcaattacagagcagccttccacaatttccccatccaatcccggagacaaatccttatccggcaacggacattccgcctcagtagattgcgtgattgtaggaggtggaatcactggtctctgcattgctcaggcactcgccactaagcaccggaatgttgctcccaatgttattgtcaccgaggctagagatcgcgtcggtggcaacatcaacaccgttgaaagggacggctatctctgggaagaggggcctaacagtttccagccctccgatcctatgctaaccatggcggtgaggatccaatttctaattgattgtcatgtctaacaaattattgacgaaatttgcttgtaattggagattttggttgaattagctaatttgatcgtattgtaggtggatagtggtttgaaggatgacctagttttgggggatcctactgcgccacggtttgtattgtgggatggacaattgaggccagttccttctaagccaagtgacttgccgttctttgatttgatgagcattggtggaaaactcagagctggttttggtgctcttggacttcggcctccacctccagtttgtcctctttaactttcttattgtaattgttctccgattgaaaatagttccccgtgtgtaattttatctgctcgaaaccttacaattctgctgaaagtgacagggacgtgaggaatcagttgaagagtttgtgcgccgcaaccttggagatgaagttttcgagcgtttgattgagccattttgttcaggtaagttaagatatttgtagcttgtagtgttcttattagttgacactgtatcatgtcaagttgtgttatcagacccaatacaacatcttactaatcatcacatgaatattgctgtatttcccatgtaaaattaaaccgatacaacatacctcgacttaaattgatgaatacaattcaatgtagtggtacttagttgacgtccctcttggttcgacgacctcttttaattatgatatgttgtgtttatctaaacactaatttatgaatttcattcaaaatctatgccattgttaatacaaatcattatcaaacttgaaatgaattccattattgaagtttatattgcatgctcaatctgatatttgattcatttatttaagtagtcctttagcgtgcatatcgtgaatggttccttgagatgtgcttttgatcatgtagcatccatcatggtgatggcttatttgttctagctatatataagatgataagagaatgactaaatgggtaacttgtctatgctgtccagaggtgtttaattgctttgcagtatctgaaaaagagtcagttggtttccctatgatgtatgcttctcaaacttaaaatcgccctagttgattttgttgctaaagtcggaagttttatttgtataatttgtatatcttgacaaggttgtccttaatgggagatgctatttttcatgtgcaggtgtttatgcaggtgatcctgcaaaactcagcatgaaagcagcattcggaaaagtttggatgctggaacaaaatggaggcagtatcattggtggcacttttaaagcaatccaggaaaggaataaaaatcccaagcctcctcgagacccgtatatttatctccttgctttgagaatatcttacatcttttgtttttgtttagtttcttgactctagtgccctgcaggcgtctaccaaaaccaaagggccaaacagtagggtcttttaggaagggactgactatgcttccagaggcaattgcatcaaggtaacatttccaccggaattgaattttatgaactttagatggttgtaataattcttgacagtggctgaagtaattgactgattacctgcattggtgttgcagtttgggtagtaatatcaagttatcttggaagcttctgggtatctctaaattggacaatcgggagtacagtttaacatatgaaacacctgaaggatcagttactgtgcagagcaagagtgtcgtacttacaattccatcccatattgccagcaatatcctgaatcctctttctgtatgtttttcataatca

SEQ ID NO: 45 - DNA, 1010 bp, Euphorbia heterophylla
agattagtgaatgatcacaacaaataccgtttgataagtccaattttttctttttttgcaagatttggttctattatagctggggcaattcagtcaaatttttcctcgaaaaaggataagagcaaggagacaaattcatcaagacataagaaacgtcagcgtggttcattttcgtttctgggtggaatgcaggtattagatgtaggatattacttatgaactctgaaatttgtatctaatatcacttttcttaaagcccctaaatgattttaatattaggattttctttttgtatctagctttattatttgctcgattttactcgttaaagctatgtttatttgttgagaagccttctagaggcgatacagattttcttagcttatgcaagtgattatcctatgaactatttatgttttcttttcccgaatctatttttctttgcagactcttcctgacaggttgtgcaaagagcttgctaaagacgagcttagacttgggtcaaaggttttgtctttgtcttataatcacgattctagatcggcgttagacaattggtctgtctcttttgcttctaagggcgacaaacgtatgcaaaactcgtcatatgatgctgtcattatgacggttagcaacttctttactgatgatataatgtttatcaattaatctttttgatatcgaaacgaaacaatttcattgtttactcagattcattatcacttctaaaatttcaggcaccactttgcaacctcaaagaaatgaggatcacaaaaggcagaaatcacttcccgttggactttattcccgaggtacccttcttgcaaatctattgacaagaatggatgtcaataattcaaccgaaaccatatgaactattgcaggtaatttatatgccactgtcggtcattattacggcgttcaaaaaggagaatgtcaggcaaccccttgaaggttttggagttctggtaccttctaaggagcaagaaaatggtctaaaaacgcttggt

SEQ ID NO: 46 - DNA, 855 bp, Euphorbia heterophylla
acttttttacatgttcagggggttatttgaaacatttgaaagttcaaggggtaactagccctttttgaacaagttcaggggttttcatgtattaggcctctatttaatattggatgctccaattggacacctgagctttatgttgtcataattagtagtagatatagctttcttttaattttcacgtgtttttttcgtgtaaatagaaagacagcgaacttgttgaagcagttgaccgtgatctgcgaaagatgctcataaatcccaatgcaaaggatccacttacacttggcgtaagagtgtggcctcaagccattccacagtttctgattggtcactacgatatcctagatacggcgaaaaatgcgttaagtgaacaaggcttggaagggctgtttttagggggtaactatgtgtatggtgtagctttgggaaaatgtgttgaaggagcatatgaaactgcgtccagtgttactaatttcctaacccagtatacttataaatagtatctgatgagatttaagcaagagttcaattatgctgcggctaagtactgtgagtttattgagtagtgggtaaaaatgttgctttaggtctgttgtatttgtaatagttgcttcacgtttttcattaaggatggtgtattctctagttatgcattcttgttcatttagcaggcaaaacgagtttgatgtgcattcagaatatgttggcagttgattgacactctaagcttacaggaagtatggaactgtatagcccatgagaatctaaaatctctaacactagccgttagtacaatggccggactatgcccaagtagttaactgttatagccagtgttttaaaaatcgg

SEQ ID NO: 47 - DNA, 121 bp, Euphorbia heterophylla
aaccgaaccgaattttcagagtaaccaaaccaaattaataactcagtctgattcgattcggaaatgcggttaccaaaaccatttgcacacccatattttacactaataaatttttaaattt

SEQ ID NO: 48 - DNA, 77 bp, Euphorbia heterophylla
ttttttcaacactaaaactgaattgaaaattgaaatgtttaactttaataaacaaaccgaaccgaattttcagagta

SEQ ID NO: 49 - DNA, 444 bp, Commelina diffusa
gctatatgaaacatcagaaggattgacttcagtacagactagaagtgttgttctgactgttccatcttatattgccagcaatctccttcgctctctttcaaatgacgcagctgatgctttgtcaaagttttactatcctccagttgctgctgtttccatttcatatccaaaggaagctattaggaacgaatgtttaatcgatggtgagcttaagggatttggccagttgcatccacgtagtcaaggagtagagacactcggaacaatatatagctcatcccttttcctggccgagctccccaagggagaatattgcttcttaactacattggaggtgctacaaatactggaattgtatcaaagaatgagagcgaactggtagaagcagttgatcgtgaccttagaaagatgctgataaagccaactgctgaggatcctcttctt

SEQ ID NO: 50 - DNA, 3043 bp, Commelina diffusa
aattttcttgtgttatgggggaaaaaatctatattgtcataaagagaaaaaaaaattgaatatacaaaccacaacaattagattgctttttccctactatatggggttagctatatgaatcttagtttgcattttttcttatctaaaaaccatttctttagatggccctagataagacagtcaccttttaggacttcgtgaagtgacttttttttttggttatataccatggttgcaagtctcagccaataccaatacgtatcatgtatcgagatcggtagctactgttataggatcgacatagtatcttggattgacatttgcttgttggctggctggccaattttggccagagaatggtaggagttggccggtacgaccgtaacggtgtcaatttcacttggtatcagccaatatcgatcattatgagctctgacaccgttgatattgtattgaaaattaaaatttctattttagaaagttaaatttttattagtttatttatttcttgttaactaatattatcaatattgatacgtatcagatttgaggaaacagatttgcagtcctggtctaaacctctaccctgtgtacgactaccgaaatctagtattgtaacttttctaacaggtgcatctactatctatagaacgtctacaaacacgtacaaactgctgtaaaggattttttcctaaacttgttattaatatgagtcacctatagttttccttgcacatacttgtttggagttgatctttcctagtgacacctaacttccacctcaacgttcttatctgtgctagacgcactgtttgggtatcttgcttcttaagagcccattattttcataaatcattgtagacctaataccaattttatacaatttacccttagatttaagagactctacaatcacataacattcatgaagtttcttgccattttaaccatcttgttttaatgctattaataatatcttctatattttctctattatcttgaataatggacacaagatacataagttttttatttctaaccaactatactccatctaacataacaaattaatttgttcttgtcctactattaatatttcgtttcatatattttgttttaactctacttcatttaaaactaaaattacatgctggaactgaggttctaatcttaagttaacaccttctgctctctcatcatataaaacttctcaacaaaaaatttatgccaaggaatatcattctagatatgccaaagtcaatagaagatatgaatttaaagaaccttggtggactcctattgtgataggagatctattgaactttcttacttatttttaattatgtcttatatctactagaaaccatttgcttttctaagatctaccaaagaacatccataggtattctatcatatgcattttctgagtcaataagaaccatatacatgtctttgttcctatttctaagcgtttgtactaattgccttgataaactgatagtggtaggtataaatccaaaatgattattagaaatattagtttcacatcttagtcgttgttctgtcactattcttttcctactttcatcttcctaagagcatcttttacttcacaagtcctgatgttttgaatataagtagttctttttttttttaattagtggaatttacctgtaaaactatgtctagcaaggctctctccaagtgtaactttataatcctcataaatcctctgatcaccatttctagtgagaaaaggaaatcaatttggcccctactagaactatccttaaaagtaattaaatgacagtctctctttccatatagaataatgattaccaccgtattgtacgataaagcagattctaaaattttgacctttacattattcatctccccatacccataatcaccacaagtaaacttaattttcctactatcttttgcctacgtgtcatggatgagtaccaggggaggaggagaggacaggggaaaaaggaacaaaatggaatcaaaataaaataaaatgctcatgccaacaataatgtggctaaaatcggacggaaaactaccgatggaagtttttgcagcatttaatgaaatgttaagtgtatttgctatttcaaaaaaactcaattattttttattgttttggcaaaggtttagattttatctgcatttaactcttataaaacattatgaaatgatatttgttatcgactttcttgcactttcatgtgctaagcgtgtcacaactgctgaatgctactatgcaggaacaatatatagctcatccctttttcctggccgagctccccaagggagaatattgcttcttaactacattggaggtgctacaaatactggaattgtatcaaaggtgttggaacttgaccatttttcagtttttgtgaagttgcaaaaagttatatcctctacgaaaacatatgcagcttaggctatccataatatataatccatttttaattagtgaaaacatatttcctaggaaacctcaattaaaatgtcatccattatgtctacaattgatactttattttgtttgctcttcttttccagacagtttttctagcatttacaccatgttgccactaggaatattgagtttggactggtttttccattcattggctaaaattttgtctatttcatttaaacatggagaggatgttgcaaacaccttctagatgtttgaattatcaaatcgttcataaagattttaagtcccaactaatatatgatgctgatttttcaagttttttttatgtgcagaatgagagcgaactggtagaagcagttgatcgtgaccttagaaagatgctgataaagccaactgctgaggatcctcttcttgttggtgtaagagtatggccacaagctataccccagttcctggttggtcatcttgaccatctcgaggcagctaatgaagccctcaggaaaggaggttttggtggattttttcttggtggcaactatgtagctggtgtggcgttaggtagatgtgtggaaggtgcatatg

SEQ ID NO: 51 - DNA, 1559 bp, Commelina diffusa
ccatgctctaatagcttgtccgtcgtaatcttgggaatgaggtttttgaacgattgattgagccattctgttcaggtgcgcacaattcaattttcgctatgataagcaaaaaggtttttcacatgataattacctttgtttttttcttttggtgattaacatgcttttgtttgtaatgtcatatatatactatgttttacctagatatttgttttgaatttttttttcttctggatttttagttttctgcgttctttactccaaattgaatcagtttgtcataactgttatggcaattgttttgatcatgtttttaaaggagtctccctgttttatcatctagcttaggagtaccaaaatgagcatttatgttctctagaagttataggataagaaagacaggtgagaccttctggactgatttcacctaaaaaaatgctaaatctgcaggggtatatgctggagatcctacaaaacttagtatgaaggcagcttttggtaaagtatggaagttagaacagactggtggaagtattattgggggcactattaagacaatccaagatcaaaagaaaaatcccaaacctcctagagatccgtaagaatttcatgaaccaaattgggtttccatactacctgattgaaagtaatgaagtatccttgagttaattgttgctatttatcagacgcctaccaacaccaaaaggacaaacagttgcatcttttaggaaagggcttaacatgctacctgcagcaatttcttccaggtctttgttttttttcattctttgtaataccctgtaactatctgcaggcttttacaaactggttatactttttttttactttaccaagttggttagttagtagttatatttatgtgttcatactgaagatgagcaacttctgttttttatcataattatatttatatatttcttttgttatctatcaaggattatccttcagatctaacagttcacaaacttcactagcttgtatcttggaacatattttctttactttaatattttcattgacttgtatttcgtggaaaaacagactgggtagcaaagtgaaactatcatggaaacttgtgagcatcaggaagctggagagccaggaatatttattgctatatgaaacatcagaaggattgacttcagtacagactagaagtgttgttctgactgttccatcttatattgccagcaatctccttcgctctctttcagtaagcttatgccccactttaagcttctacagtccctttgaatatgtttatggaattctgttataaagaccttctcggttgctttttctgtagttaatttatgtggatggagaatctttctagaaattgttgacatgatactatatatggtatctatattgtgtgacatgttattgttgaccaatatatgctgttttcttgagttatctattccattgctctggaaatttctagatgttttatcatatcttacctatgttattttactgtcttaccatgacatatatatattttaattgtttattatgattaaagatatatatat

SEQ ID NO: 52 - DNA, 589 bp, Commelina diffusa
ttatgattaaagatatatatatccaattagtttacttccacattgcataatgtaccttgatatatatttcctactagcattttttccttaaaattacgatttttgtatgattatcagattaacaacactagcggcctcttttatattgatcctagtggaaggaggatattcctcctaatttgttgtactaagacatcggctacatttttttttttgcttatggagacatctatattaatatttgtggttcacatgattcttgttgcttaaagattatttaatggatggtggttgcagaatgacgcagctgatgctttgtcaaagttttactatcctccagttgctgctgtttccatttcatatccaaaggaagctattaggaacgaatgtttaatcgatggtgagcttaagggatttggccagttgcatccacgtagtcaaggagtagagacactcggtactgttctgtcttgtttatggccccacactactcaccccaaatataatataggttctatatgtatatgctctctggatttccatttgcaataacagaaatcatgcctagcaaataattatatagtcatga

SEQ ID NO: 53 - DNA, 876 bp, Digitaria sanguinalis
gacatcctgcgtccactttcaagtgatgctgcagatgccctttcaagattctattatccaccagttggtgctgtgactatttcatatccaaaggaagcaattagaaaggaatgcttgattgatggggagctccagggttttggccagttgcatccacgtagtcaaggagttgagacattaggaacaatatacagctcatcactcttcccaaatcgtgctcctgctggaagggtattacttctaaactatataggaggtgctacaaacactgggattgtctccaagagtgaaagtgagctggtagaagcagttgaccgtgaccttaggaaaatgctcatcaaccctagagcagtggaccctttagtccttggtgtccgagtgtggccacaagccatacctcagttcctggtaggacatcttgatcttctggaggttgcaaaatctgccttgggccgaggtggctatgatgggctcttcctaggagggaattatgtagcaggagttgccctgggccgatgcgtggagggtgcctatgaaagcgcctcgcaaatatctgacttcttgaccaagtatgcctacaagtgatgaaagaagtcgagctgctcgttgttttgcatagatgaggtgagaccaggagtggcacaaagtttacaaggattttttttttcatcttatttcgtaaattgtacttctgatctttttccctgttagtaattagttagactgtaggactctaagacatgctctgttcgccatcctagaaaggaagttttcttttaggttcatcaacgagatcatccatgcagactcgtgtagcgttttcctgtaaacactagttccaggaaatttaaatactctcttgcaagagcaaaaaaa

SEQ ID NO: 54 - DNA, 518 bp, Digitaria sanguinalis
acctaatgccatctcaaaaagcttgggtagcagagtgaaattatcatggaagctaataaatatctcaaagttggagaatagaggttataatttgacttacgaaacaccaaatggatttgcaagtctgcaaactaaaactgttgtcatgactgttccttcctacgtggcgagtgacttgttgcgtcctctttcgtcggaagcagctgaggctttgtccaaattttattaccctccagttgcagctgtatctgtttcctatccaaaagaggcgattcgtgctgaccgtttgatcgatggtcaacttaagggttttggtcaattacatccaagaagtcaaggcgttgagactttaggtaccatctatagttcatcccttttccctaaccgggcgccacctggaagggttctcctcctcaactacattggaggggctacaaatcctggtattttgtcaaagacagagagtgaacttgtggaagcagttgaccgtgatctaaggaagatgctcataaacccta

SEQ ID NO: 55 - DNA, 387 bp, Digitaria sanguinalis
tggaggattctttcaacgtcattttgggaaggaggttgttgagtatctcattgatccagttgttgcgggaacaagcggtggagatcctgaatcactttcaatgcgttatgcgtttcctgagttatgggatttagagagaaggttcggttcaatcatttctggggcatttctgtcaatgttatcttccagaggtgggaaaaggaaaccttctggaaacagcaaacgtaggcgtggttctttttcttttttgggtgggatgcagacgctcactgatgcactatgcaaagagattggaccccatgaatttaatctccaatcaaaggttcttgaaatgtcctacagctgcgatgataacgtggttggtaattggtcaatttattgtgctcc

SEQ ID NO: 56 - DNA, 2697 bp, Digitaria sanguinalis
cttgcgtctcacaaaaggcgcgagctggccggcccgctacttttgtgctttgtcttgtctccttcaggcttcagcaatggacaaacatccccctcaagtaaagcttaatagaaatcgattttgatgaacgaataaccatcattaacggcatcatggccatcgcttcgatgggatcagttgcttgcagagccggccaaagtgggcacgtgagagccacgaggatacgcgagatgacgacgaccatggaggtggtttcgaactttcgatcgccgatttttattgcgtcagtttcacagccagagatgcttggcctagtacggctgacgatgagcgtttgtttagctcatctgaaggaatgtgttttgcctgttgccaccaagattagcgtccttttcttttatcgaattcgggtcaccatttccactattaatcaaagatatagtttctatattttttctcattaatccacagtaccttttatttcagtagttattattgcatccatacttcaccagtacggcaccctttgcaatctctgcctacactccattacctcgaagaatagtgcactacagatgcaataaacacccacctcaccgactgctcgtaggtgcaccagtacactacatttgctgctgcatgctggtcgccatcatccttcctgcctgcaggaagcagcagggtgtctgggatctgcatcatgccgggcgcacaagaggaacagacgtgccaataaaagggctagcaacgcaacgaggggagggcccctttttttcgtgttacctcccgtcctgtgcatgagttgtcgtgtgtaacagacgtgcttggtgataaagcgtaggtgaagaagtggcctcccctgtgtcccctcccttctcaggaacgtttcgtcatcttttcactgaaaacgggcgcgtgctaactgccgcatctgtgagttgaatggttgattggagagaaattaggtgtgcaatcaccacttgggcggcaatcgtgtgcacttacttttggttgggtgtcagatcaacaacaggggtttcttggggaaatgtttccaaatgtacttctcaaaattacttctagtgtacacatgttgaatttcagttcaaatttatttacaagaataataaacaaagaagaaaattggcaaacaacattcataaaaaatggaatgaaaagagaaatgcatccttcttttgaagataaatagtcaaatgccatgtttgtttcgttcacaaacagaaaaatgatttcatgattgcaccgcaagagtggatgaatatatataggtctacagttgaacaccaatttggaagaaaaattcatgaggcagaagtaaaatcgattatttccttgagcttccgcattgcatctcccaaaagaaaaccattaaatactactagcaagttctagtacagtccctactaattaaacatcagcataattatccttcttatactcactcgggttttttcttatatgtcgtattagtttcatcttaagtcaaacttgtcaaaatttgaccaagtttatacaaaagtataacaataactatactaccaaacttatatggtatcacaatatatttcattagtagggactgtctcgccggtcggggaaattaaacgccccccgatccgtcaccgtgacctgccctcctccccgcccgggcagatcgggccatcgcctccatcggggcacggctaggtacctgaaaacgatcgagcaaagcggccggttcgtttcgttcgtagcgagaggcatttgctgccagttcccggcgcgggacacgcgcgcgcgaaatggcggtgtcgagagggagggaggcgtcgctttcggcgggcgggggcgtgttccctggctgtagcccggcggcgcggcaggcctcgcgcgggtgtcaataccggcccggcggattaggtccccgtctttatgaccggcgcgcgcgcacccttgcggtgcccgtgcgttgacgacgctgccaccgcacgtcccccttcttcattccatggcagggacgacgacgctagctatagctgcacgtacgcggtcgatcgagtggctatggcttggtctctactgcacgccatgccgcccggcctcccaccacaataactcgtgtgccggcccggcacggcgcgggccgtggtggaactgatcgcgtcgcgcattgatcatcatgcgtgggggcgtcggggcgacggctcgagcgtgcgcacatgattgtgcgtgtcaggatcccagacgctagctacagcttgctgctggtccatccagtgccctacgtggacgccgatcgctgtgtgttggtgtgtggggtgatgatgatggcggatggatggagtcatggaggcactgcggggctcacaggagattttggtgggtggtggacgcatccgtcgcgtcgcccccggcgctcgagtgcaccccgtaccaacccaacacgtccgctgtcgtggagacgccggagggcgcatgaaatcattgttaattttctcttgtgtgttttttttaaaaaaattataataacaaaagatgcatgctcccttcttctttgattaactaatcgatcagctagctaactcacacattgtccttcctgcaagtagcgcatgtatatttatgctcaactatatgggtatatactttttttaaaaaaaacataatcaactatatatatgggttatatgtgggcga

SEQ ID NO: 57 - DNA, 1089 bp, Digitaria sanguinalis
taggtatttctttcaactgagtcttaagctacaacatctacagattattgtttttcttttgtggtgtgatttttcattctagtatgtattatgtcttcttttgttgaatccaagatatgaatcaaaatagtggtggtatgcttttgtaggaacaatatacagctcatcactcttcccaaatcgtgctcctgctggaagggtgttacttctaaactatataggaggtgctacaaacactggaattgtttccaaggttagtaattctctgtcgaacttattgccttgagttttgtgttcatgatgttttgactgtaaaaagaaaattggcattctttaataatcaacgtaagcagtattttaaaaagaaagttggcattttaataatcaatatcaacttgtaactagattgcttattattggctattattatttaggtgggacccgcagactatttaggtgtggaacccatgtgggacccgcatactatttaggcgggacccacgcatattcagacacactatttagagtggaacctacaataatgttaagcgtctacgttatttaaaaaattattgataattgttttcattctttgcagtataaaatatatttatttttttctatgtataaaaataatctctaactttgtatactacattcgtttgtgatagttctaatactttttgtactttgctttcatttcataaatttgaaaaataagattgaattatacattcgttacaaaatgtatcttttttctattaaaaattaaaaattagtgtaacataacacgtcactccattagctatttctactaccacttatatagtgcttaaatgattattatgattaaaaaatttgtctaaatttaatattgcattgagtatagtaagataacaaatttgtattacatcattattttagtttaacatcttctatatagacgcacatcgctcgtcaacccaactagtattcctaatgatgccatctcaattgcagagtgaaagtgagctggtagaagcagttgatcgtgacctcaggaaaatgctcatcgaccctagagcagtggaccctttagtccttggtgtc

SEQ ID NO: 58 - DNA, 1518 bp, Kochia scoparia
atacactgctctacaatctcaacctcaactccaacctcaagttcaaacccaggaacacttggcgaaggaggattattggattgtgtgatcgtgggaggtggtattagtgggctctgcattgcacaagcactttctacaaagtactcttctctttctacaaatttcattgttaccgaggcgaaagatcgagttggtggcaacattaccaccaaggaggatgatggctatatctgggaagaaggacccaacagttttcagccgtctgatgcagttctcaccatggctgttgattgtgggttgaaagatgaattggtgtttggtgaccccaaagcacctcgatttgtgctgtggaatgggaaattaaggcgggtaccttctaagctcacagatctccctttctttgatcttatgagctttcctggcaagattagagctggccttggcgctcttggatttcgtccttctccaccaggtcgtgaagaatctgttgaggattttgttcgtcgaaatcttggcgatgaggtctttgaacgtttgattgaacctttttgttcaggtgtgtatgctggtgatcctgccaagttaagcatgaaagctgcttttggcagagtgtgggttttggagcagatgggtggtaatatcattggtggcgctctcaaaactatccaggaaaagaagaataagcctaagccgcctcgagatccgcgccttccgaagccaaagggtcagacagttggatcctttaggaaaggactcattatgttgccgaacgccatttctgctaggcttggaagtaaagtgaaactttcttggactctagctagtatttctaagacacacaatggggaatataatttgatttatgatacaccagatggaccggtttccgtaaggactaaaagtatcgtgatgactattccatcatatgttgcaagtagtctgcttcgtccattctcagatgctgctgcagattccctttcaaaatttcactatccacctgttgcagcagtgtcactgtcttatcctgaagaagcgattagacctgagtgcttgattgatggtaaacttcaaggattcgggcaactgcatccccgcagtcagggtgtggaaaccttgggatcaatttatagttcatctcttttccctggtcgagcaccacctggtaggaccatgatcttgagcttcattggaggtgctactaatcctggcatagtagacaagacgcaagatgaacttgctaagactgttgacaaggacctgagaagaattcttataaatccaagtgcaaaagatcctcgtgttctaggcgtgaaagtatggcctcaagcaataccccaatttttgataggccactttgatctgcttgatgctgcaaaagctgctttgactgatgctgggtgtaaaggattgtttcttggaggaaactatgtatcaggtgttgccttggggcggtgtatagagggtgcttatgaatctgcagccgaggtagttgatttcctctcccagtattcagacaaa

SEQ ID NO: 59 - DNA, 963 bp, Kochia scoparia
atacactgctctacaatctcaacctcaactccaacctcaagttcaaacccaggaacacttggcgaaggaggattattggattgtgtgatcgtgggaggtggtattagtgggctctgcattgcacaagcactttctacaaagtactcttctctttctacaaatttcattgttaccgaggcgaaagatcgagttggtggcaacattaccaccaaggaggatgatggctatatctgggaagaaggacccaacagttttcagccgtctgatgcagttctcaccatggctgttgattgtgggttgaaagatgaattggtgtttggtgaccccaaagcacctcgatttgtgctgtggaatgggaaattaaggcgggtaccttctaagctcacagatctccctttctttgatcttatgagctttcctggcaagattagagctggccttggcgctcttggatttcgtccttctccaccaggtcgtgaagaatctgttgaggattttgttcgtcgaaatcttggcgatgaggtctttgaacgtttgattgaacctttttgttcaggtgtgtatgctggtgatcctgccaagttaagcatgaaagctgcttttggcagagtgtgggttttggagcagatgggtggtaatatcattggtggcgctctcaaaactatccaggaaaagaagaataagcctaagccgcctcgagatccgcgccttccgaagccaaagggtcagacagttggatcctttaggaaaggactcattatgttgccgaacgccatttctgctaggcttggaagtaaagtgaaactttcttggactctagctagtatttctaagacacacaatggggaatataatttgatttatgatacaccagatggaccggtttccgtaaggactaaaagtatcgtgatgactattccatcatatgttgcaagtagtctgcttcgtccattctcagtgagt

SEQ ID NO: 60 - DNA, 564 bp, Kochia scoparia
caggatgctgctgcagattccctttcaaaatttcactatccacctgttgcagcagtgtcactgtcttatcctgaagaagcgattagacctgagtgcttgattgatggtaaacttcaaggattcgggcaactgcatccccgcagtcagggtgtggaaaccttgggatcaatttatagttcatctcttttccctggtcgagcaccacctggtaggaccatgatcttgagcttcattggaggtgctactaatcctggcatagtagacaagacgcaagatgaacttgctaagactgttgacaaggacctgagaagaattcttataaatccaagtgcaaaagatcctcgtgttctaggcgtgaaagtatggcctcaagcaataccccaatttttgataggccactttgatctgcttgatgctgcaaaagctgctttgactgatgctgggtgtaaaggattgtttcttggaggaaactatgtatcaggtgttgccttggggcggtgtatagagggtgcttatgaatctgcagccgaggtagttgatttcctctcccagtattcagacaaa

SEQ ID NO: 61 - DNA, 516 bp, Kochia scoparia
gtaacttgcctacccctctcagttataattactacattcaagaaggttaatgtgaaaagacctcttgagggctttggagttcttgtcccctctgttgagcagaaaaatgggttgaagactcttggtacactattttcctccatcatgtttcctgatcgtgctccctctgatgtgtatctctatacaacctttgttggtggaagcaggaatagtgaacttgcaaaagcttcaacggatgagctgaagcaaatagtttcttctgaccttgagaagctattgggcactgagggtgaacctacctctgtgaatcatttctattggagcaaggcattccctctttatgggcgcaactatgactcagtactcaaagcaatcgagcagatggaaagagatcttcgtggacttttttatgcaggcaaccataaagatggactttccgtgggaaaagctataacatcgggacacaaagctgcggagcttgtaatgttgtatctcaactcttcattagatgcaaag

SEQ ID NO: 62 - DNA, 1185 bp, Lolium multiflorum
gagcgcctcatcgagccttctgctcaggtgtgtatgcgggtgacccttcaaagctcagtatgagggctgcgtttgggaaggtatggagactggaggagaatggaggcagtattattggtggaaccatcaaggcaattcaggatagaggcaagaaccccaaaccgccgagggatccccgacttccgacaccaaaggggcagacggtggcatctttcaggaagggtctagccatgctcccaaatgctatcgcttctaggttgggtagtaaagtcaaactctcgtggaagcttacgggcattacaaagtcggacaaccagggatatgtgttagcgtatgaaacaccggaaggagttgtttcagtgcaggctaaaagtgttatcatgaccattccgtcatatattgctagtgaaatcttgcgcccactttcgagtgatgcagcagatggtctctcaaaattttattatccaccggttgctgctgtaactgtttcatatccaacagaagctattagaaagaatgcttaattgatggggagctccagggtttcggccagttgcatccacgtagccaaggagttgagactttagggacaatatatagctcttctctctttccgaatcgtgctcctgctggaagagtgttacttctgaactatatcgggggtgctacaaatacagggatcgtctccaagactgagagtgacttggtggaagcagttgatcgtgacctcagaaaaatgttgataaatcctacagcaccagaccctttagccttaggcgtccgagtgtggccacaagccattccacagtttttgattgggcaccttgatcgccttgatgcggcaaaatctgccttggccagaggcggctgcagtgggttgtttctaggaggaaactatgtagcaggagttgccttgggccgatgcatcgagggtgcgtacgagagtgcctcagaagtatctgacttcttgaccaagtatgcctacaagtgatgaaagaagtgtaattcatcatcttgctgcatatttgaggtgcggccagaattagtaataattcggaaaatcttgtaatcttctctacttatacctcctatcgttttcctaatcgcaatttagttagaagttaggtttgtagaagaaattttactagttgttcagtataattctttcagattttggtgatgcaa

SEQ ID NO: 63 - DNA, 258 bp, Lolium multiflorum
ttgaaacaacttgtgacctctgaccttagaaagctcttgggtgtagaggggcagccaacttttgtgagacatatacattggaaaaatgcttttcctctgtatggccatgattatgatttggcattggaagctataggaaagatggagaatgatcttccagggttcttctatgcaggaaataacaaggatggcttggctgttggaaatgttatagcttcaggaagtaaaactgctgatctggtgatctcgtatcttgag

SEQ ID NO: 64 - DNA, 201 bp, Lolium multiflorum
ttgatatttattatgcaggtggattatctgccgttatccctcatggtaacagcttttaagaaggaagatgtcaaaagacccctggaaggatttggggtgttggtaccctataaggaacagcaaaaacatggtctgaaaacccttggaaccctcttctcctctatgatgttcccagatcgagctcctaatgaccaacactta

SEQ ID NO: 65 - DNA, 150 bp, Lolium multiflorum
aatcctgccttattggtatttattatgcaggtggattatctgccgttatccctcatggtaacagcttttaagaaggaagatgtcaaaagacccctggaaggatttggggtgttggtaccctataaggaacagcaaaaacatggtctgaaa

SEQ ID NO: 66 - DNA, 144 bp, Lolium multiflorum
agtgttgggagcttctttgaacgccattttggaaaggaagttgtcgactatcttattgatccatttgtagctggaacaagtgcaggagatcctgagtcattatctatccgtcatgcatttccagcgttatggaatttagaaaag

SEQ ID NO: 67 - DNA, 114 bp, Lolium multiflorum
ataggaaccctcttctcctctatgatgttcccagatcgagctcctaatgaccaacacttatttacaacattcgttgggggaagccacaatagggatctcgctggagctccaacg

SEQ ID NO: 68 - DNA, 108 bp, Lolium multiflorum
agggtggccatcatcggcgccggcgtgagcggcctggcggcgtgcaagcacctgctggagcgcggctgccggcccgtcgtcttcgaggcggacacgctccttggcggt

SEQ ID NO: 69 - DNA, 3037 bp, Lolium multiflorum
ctcgacgcgaacgcgggatctctttcgcgtcaggcgtgaaatagggccggatttccatatacaactactaaccgagaaccccgcccactggaatgcgattcccagcccatcgacctatccaattccaattccagtgggccatgaaaaccgcaaaccaaccaaccaatacagccgcagccgcatcccgtcatccactccgcactgccatctcccccgcccgagcgacggaaatggtcggcgcaaccatggccaccgctaccgtcacggcggcgctaccgctccgcctccgggtccccgcgcgcccccgacgcggacagacgcgctgcgcggtcgcgagcgatgccaccgaggcgccggccgtgcccagcgcacggctgtccgcggattgcgtcatcgtgggcggcggcatcagcggcctctgcaccgcacaggcgctggccaccaagtacggcgtcaccgacttgctcgtcacggaggcccgcgctcgcgcaggcggcaacatcaccaccgtcgagcgccccgacgaggggtacctctgggaggagggccccaacagcttccagccctccgaccccgtcctcaccatggccgtacgcaccatgctcgctttctccttcttttccggattcttcgggacgtaggcgtacagaatacagatacgatcgctgaatggattggttgcgcaggtagacagcgggctcaaggatgacttggtgttcggggaccccaatgcgccgcgcttcgtgctgtggcaggggaagctgaggccggtgccgtccaagcctggcgacctgcctttcttcgacctcatgagtattcctgggaagctcagggccggccttggcgcgctcggcattcgtccgcctcctccagtttgtgctctgcccgtgctctctattctttagtgaattttgattgtcaaagatggggctgagcgttcccggcgaaggtttcaggggcgtgaggagtcggtggaggagtttgtgcgccgcaacctcggcgcggaggtctttgagcgcctcatcgagcctttctgctcaggtaatgtgcagtagtatatgtctgttctgttctgctctgcttcttgcattgatcccgataataagaatataacatttcgatatcaacgttaggtgtgtatgcgggtgacccttcaaagctcagtatgcgggctgcatttgggaaggtatggagactggaggagaatggaggcagtattattggtggaaccatcaaggcaattcaggatagaggcaagaaccccaaaccaccgagggatccgtaagtggagactctacttttctatttagtcagttaactcactgttccattagactcgtattaatctgtttcaccacttttagccgacttccgacaccaaaggggcagacggtggcatctttcaggaagggtctagccatgctcccaaatgctatcgcttctaggtttgttttcatcacttgtgcacatacctaagttatgctatcagtatacgtggtgctgtatattgttcagatagaggggacagatctgttggtagacctactgtttgctgaactcaataccatatgaatatcattgcatcagcacccaaagtacctgtggctcgattattatatcagccattctcgcattgttgatactaatgcatctgtgttaatctttttcatcttgcttttttggttgggacctgtactatataggaaattccacgagggatgagttatagagcatgtgtgtgtatgtccatgccccttgtactcggagatgatcatgaattatagtaataatttcatgcttggtcttaagacgtaaccctgtcatgttttgcattccttcatttccaggttgggtagtaaagtcaaactctcgtggaagcttacgggcattacaaagtcggacaaccagggatatgtgttagcgtatgaaacaccggaaggagttgtttcagtgcaggctaaaagtgttatcatgaccattccgtcatatattgctagtgaaatcttgcgcccactttcggtaagttcatgtttgcaaaattaattggtgtactactaatgttagtgttaggttcctgtagttctccatactcctgtgcagtggcggacccaggattttggcaaagggtatgccacacaaaaaaattggcctgccttgataacgattttttcttagaatatgaagtagaagtgatgattatgaaatatgattgaaaaaatcaaataaaagtgttcttgcattataatcaaaatattaaattgcttaacacatgcacggtttgcgaggtgtcctattttttaaactaatttctcaccgtaccatctgaccctaaatttctgaagtatttgaccacggaataatcgtttcagcaacactacaagataacgttagatcgtactaaataaacaaagaaatatgctgaagaaagctacaacggagcatataaaaattagtcacaatagctaaatggtttcttaattaatcaccatagctaatcatccattacgaaagtacctggacgcatgcatggtgcatggccatgtctctaggctagtttagcaattaaccggatggtcaagtgagtaccaaaaactaataaagcatgtgtccctgtacgatgcatgctcgcaggctacatgcaccggcttgattaaaatggccagctgattacaggcggttcatatggctgggccgctaggtatgccatggcatatgcggcataccctgtaggtccgcactgctcctgtggtaaccatgaaatagcacgctagtacactattccttaatagagttgctaatcaataattgaccgcattacgatactggttgcctgtaatcttagtccaaacacatgattgagcatttttgttgagagattaattgattaatgtggttaaactgttcactgatgcataggttggactatttcttcaccaatcaactctatgtttcaaataattgaaatatacatcaatagattcagaaaactgtatcttgttttgacaaagtgacgcaagacaccaatatgccttatgat

SEQ ID NO: 70 - DNA, 795 bp, Lolium multiflorum
ggttttggtattattctactaataattcgtggcatttttatgtagggacaatatatagctcttctctctttccaaatcgtgctcctgctggaagagtgttacttctgaactatatcggtggtgctacaaatacagggatcgtctccaaggttctctcgacctgctggatactcatgtcattttcttattgcgtgataccaggttacagtattcagttagtgttggtcacctattcatttatgattaatataaataactggactgcatttttcacccccagctgcaattgtgaatacaaatagattaaatggtctgcttagatgctacattcaatctcaatagtattgttagattttttttttggctggccatatttatactgatcccattttgtttgcagactgagagtgacttggtggaagcagttgatcgtgacctcagaaaaatgttgataaatcctacagcaccagaccctttagccttaggtgtccgagtgtggccacaagccattccacagtttttgattgggcaccttgatcgccttgatgcggcaaaatctgccttggccagaggcggctgcagtgggttgttcctaggaggaaactatgtagcaggagttgccttgggccgatgcatcgagggtgcgtacgagagtgcctcagaagtatctgacttcttgaccaagtatgcctacaagtgatgaaagaagtgtaattcatcatcttgctgcatatttgaggtgcggccagaatcagtaataattcggaaaatcttgtaatcttctctacttatacc

SEQ ID NO: 71 - DNA, 381 bp, Lolium multiflorum
tcaggggcgtgaggagtcggtggaggaatttgtgcgccgcaacctgggtgcggaggtctttgagcgcctcatcgagcctttctgctcaggtagtgtgcagtagtatctgtctgttctgttctgctctgcttcctgcattgattccgataataagaatataacatttcgatatcaacgttaggtgtgtatgcgggtgacccttcaaagctcagtatgcgggctgcgtttgggaaggtatggagactggaggagaatggaggcagtattattggtggaaccatcaaggcaattcaggatagaggcaagaaccccaaaccgccgagggatccgtaagtggagactgcaattttctatttagtcagttaactgttccattagact

SEQ ID NO: 72 - DNA, 200 bp, Amaranthus albus
ggaatccttgatttgaagataggataaccagagagagtgcgagagagatgagtgcgatggcgttatcgagcagcattctacaatgtccgccgcactccgacatctcgttccgcttttttgctcatacacgaacccactcccccatcttcttcagaagaccacgaaaattatcatatatccattgttccacaagctcaagc

SEQ ID NO: 73 - DNA, 200 bp, Amaranthus albus
gcttgagcttgtggaacaatggatatatgataattttcgtggtcttctgaagaagatgggggagtgggttcgtgtatgagcaaaaaagcggaacgagatgtcggagtgcggcggacattgtagaatgctgctcgataacgccatcgcactcatctctctcgcactctctctggttatcctatcttcaaatcaaggattcc

SEQ ID NO: 74 - DNA, 200 bp, Amaranthus albus
tatccattgttccacaagctcaagctcaactgccaattaccagaacacgattacgagccaaggagaaggagaaaaagtattagattgtgtaattgttggagctggtatcagtggactttgcattgctcaggctctttctaccaaacacattcaatccaatctcaatttcattgtcactgaagctaaacatcgtgttggag

SEQ ID NO: 75 - DNA, 200 bp, Amaranthus albus
ctccaacacgatgtttagcttcagtgacaatgaaattgagattggattgaatgtgtttggtagaaagagcctgagcaatgcaaagtccactgataccagctccaacaattacacaatctaatactttttctccttctccttggctcgtaatcgtgttctggtaattggcagttgagcttgagcttgtggaacaatggata

SEQ ID NO: 76 - DNA, 200 bp, Amaranthus albus
actgaagctaaacatcgtgttggaggtaatatcactaccatggagtccgatggctatatctgggaagagggtcctaatagtttccaaccctccgatcctgtgcttactatggcggttgacagtggattgaaagacgatttggtcttgggagatcctaatgcccctcgtttcgtgctgtggaatggtaaattaaggcctgt

SEQ ID NO: 77 - DNA, 200 bp, Amaranthus albus
acaggccttaatttaccattccacagcacgaaacgaggggcattaggatctcccaagaccaaatcgtctttcaatccactgtcaaccgccatagtaagcacaggatcggagggttggaaactattaggaccctcttcccagatatagccatcggactccatggtagtgatattacctccaacacgatgtttagcttcagt

SEQ ID NO: 78 - DNA, 200 bp, Amaranthus albus
tgtggaatggtaaattaaggcctgttccttccaaacctacggaccttcccttttttgatctcatgagctttcctggtaagattagggctggtcttggtgcacttggtcttcgtcctcctcctcctccttcttcttatgaggaatccgttgaagaatttgtgcgccgtaatctcggcgatgaggtcttcgaacgcttgatt

SEQ ID NO: 79 - DNA, 200 bp, Amaranthus albus
aatcaagcgttcgaagacctcatcgccgagattacggcgcacaaattcttcaacggattcctcataagaagaaggaggaggaggaggacgaagaccaagtgcaccaagaccagccctaatcttaccaggaaagctcatgagatcaaaaaagggaaggtccgtaggtttggaaggaacaggccttaatttaccattccaca

SEQ ID NO: 80 - DNA, 200 bp, Amaranthus albus
cgatgaggtcttcgaacgcttgattgaacccttttgttctggtgtctatgctggtgatcctgcaaagttgagtatgaaagctgcatttggaaaggtctggaccttagagcaaaagggtggtagtatcatcgccggtacactcaaaactattcaggaaaggaagaataatcctccaccccctcgagacccccgccttccta

SEQ ID NO: 81 - DNA, 200 bp, Amaranthus albus
taggaaggcgggggtctcgagggggtggaggattattcttcctttcctgaatagttttgagtgtaccggcgatgatactaccacccttttgctctaaggtccagacctttccaaatgcagctttcatactcaactttgcaggatcaccagcatagacaccagaacaaaagggttcaatcaagcgttcgaagacctcatcg

SEQ ID NO: 82 - DNA, 200 bp, Amaranthus albus
ccccctcgagacccccgccttcctaaacctaagggccagactgttggatcctttaggaaaggactcattatgttacctaccgccattgctgctaggcttggcagtaaagtcaaactatcgtggacactttctaatattgataagtcgctcaatggtgaatacaatctcacatatcaaacacccgatggaccggtttctgt

SEQ ID NO: 83 - DNA, 200 bp, Amaranthus albus
acagaaaccggtccatcgggtgtttgatatgtgagattgtattcaccattgagcgacttatcaatattagaaagtgtccacgatagtttgactttactgccaagcctagcagcaatggcggtaggtaacataatgagtcctttcctaaaggatccaacagtctggcccttaggtttaggaaggcgggggtctcgaggggg

SEQ ID NO: 84 - DNA, 200 bp, Amaranthus albus
taggaccttgatcttgagctacattggaggtgctacaaatcttggcatattacaaaagagtgaagatgaacttgcggagacagttgataaggatctcagaaaaattctgataaatccaaatgcgaaaggcagccgtgttctgggagtgagagtatggccaaaggcaatcccccaatttttagttggtcactttgatctgc

SEQ ID NO: 85 - DNA, 200 bp, Amaranthus albus
gcagatcaaagtgaccaactaaaaattgggggattgcctttggccatactctcactcccagaacacggctgcctttcgcatttggatttatcagaatttttctgagatccttatcaactgtctccgcaagttcatcttcactcttttgtaatatgccaagatttgtagcacctccaatgtagctcaagatcaaggtccta

SEQ ID NO: 86 - DNA, 200 bp, Amaranthus albus
tttttagttggtcactttgatctgctagatgctgcaaaagctgctttggcaaatgctgggctaaaggggttgtttcttggtggtaattatgtatcaggtgttgccttggggaggtgtatagagggtgcttatgactctgcatctcaggtagtggatttcctctcacagtacaaagacaagtagtcagtagggctccagca

SEQ ID NO: 87 - DNA, 200 bp, Amaranthus albus
tgctggagccctactgactacttgtctttgtactgtgagaggaaatccactacctgagatgcagagtcataagcaccctctatacacctccccaaggcaacacctgatacataattaccaccaagaaacaacccctttagcccagcatttgccaaagcagcttttgcagcatctagcagatcaaagtgaccaactaaaaa

SEQ ID NO: 88 - DNA, 200 bp, Amaranthus graecizans
gtgcgagagagatgagtgcgatggcgttatcgagcagcattctacaatgtccgccgcactccgacatctcgttccgcttttttgctcatacacgaacccactcccccatcttcttcagaagaccacgaaaattatcatatatccattgttccacaagctcaagctcaactgccaattaccagaacacgattacgagccaa

SEQ ID NO: 89 - DNA, 200 bp, Amaranthus graecizans
ttggctcgtaatcgtgttctggtaattggcagttgagcttgagcttgtggaacaatggatatatgataattttcgtggtcttctgaagaagatgggggagtgggttcgtgtatgagcaaaaaagcggaacgagatgtcggagtgcggcggacattgtagaatgctgctcgataacgccatcgcactcatctctctcgcac

SEQ ID NO: 90 - DNA, 200 bp, Amaranthus graecizans
ttaccagaacacgattacgagccaaggagaaggagaaaaagtattagattgtgtaattgttggagctggtatcagtggactttgcattgctcaggctctttctaccaaacacattcaatccaatctcaatttcattgtcactgaagctaaacatcgtgttggaggtaatatcactaccatggagtccgatggctatatct

SEQ ID NO: 91 - DNA, 200 bp, Amaranthus graecizans
agatatagccatcggactccatggtagtgatattacctccaacacgatgtttagcttcagtgacaatgaaattgagattggattgaatgtgtttggtagaaagagcctgagcaatgcaaagtccactgataccagctccaacaattacacaatctaatactttttctccttctccttggctcgtaatcgtgttctggtaa

SEQ ID NO: 92 - DNA, 200 bp, Amaranthus graecizans
accatggagtccgatggctatatctgggaagagggtcctaatagtttccaaccctccgatcctgtgcttactatggcggttgacagtggattgaaagacgatttggtcttgggagatcctaatgcccctcgtttcgtgctgtggaatggtaaattaaggcctgttccttccaagcctacggaccttcccttttttgatct

SEQ ID NO: 93 - DNA, 200 bp, Amaranthus graecizans
agatcaaaaaagggaaggtccgtaggcttggaaggaacaggccttaatttaccattccacagcacgaaacgaggggcattaggatctcccaagaccaaatcgtctttcaatccactgtcaaccgccatagtaagcacaggatcggagggttggaaactattaggaccctcttcccagatatagccatcggactccatggt

SEQ ID NO: 94 - DNA, 200 bp, Amaranthus graecizans
ctacggaccttcccttttttgatctcatgagctttcctggtaagattagggctggtcttggtgcacttggtcttcgtcctcctcctcctccttcttcttatgaggaatccgttgaagaatttgtgcgccgtaatctcggcgatgaggtcttcgaacgcttgattgaacccttttgttctggtgtctatgctggtgatcct

SEQ ID NO: 95 - DNA, 200 bp, Amaranthus graecizans
aggatcaccagcatagacaccagaacaaaagggttcaatcaagcgttcgaagacctcatcgccgagattacggcgcacaaattcttcaacggattcctcataagaagaaggaggaggaggaggacgaagaccaagtgcaccaagaccagccctaatcttaccaggaaagctcatgagatcaaaaaagggaaggtccgtag

SEQ ID NO: 96 - DNA, 200 bp, Amaranthus graecizans
ttctggtgtctatgctggtgatcctgcaaagttgagtatgaaagctgcatttggaaaggtctggaccttagagcaaaagggtggtagtatcatcgccggtacactcaaaactattcaggaaaggaagaataatcctccaccccctcgagacccccgccttcctaaacctaagggccagactgttggatcctttaggaaag

SEQ ID NO: 97 - DNA, 200 bp, Amaranthus graecizans
ctttcctaaaggatccaacagtctggcccttaggtttaggaaggcgggggtctcgagggggtggaggattattcttcctttcctgaatagttttgagtgtaccggcgatgatactaccacccttttgctctaaggtccagacctttccaaatgcagctttcatactcaactttgcaggatcaccagcatagacaccagaa

SEQ ID NO: 98 - DNA, 200 bp, Amaranthus graecizans
cagactgttggatcctttaggaaaggactcattatgttacctaccgccattgctgctaggcttggcagtaaagtcaaactatcgtggacactttctaatattgataagtcgctcaatggtgaatacaatctcacatatcaaacacccgatggaccggtttctgttaggaccaaagcggttgtcatgactgtcccttcata

SEQ ID NO: 99 - DNA, 200 bp, Amaranthus graecizans
tatgaagggacagtcatgacaaccgctttggtcctaacagaaaccggtccatcgggtgtttgatatgtgagattgtattcaccattgagcgacttatcaatattagaaagtgtccacgatagtttgactttactgccaagcctagcagcaatggcggtaggtaacataatgagtcctttcctaaaggatccaacagtctg

SEQ ID NO: 100 - DNA, 200 bp, Amaranthus graecizans
cggttgtcatgactgtcccttcatacattgcaagtagcctgcttcgtccgctctcagatgttgctgcagattctctttctaaattttactatcctccagtcgcagcagtgtccctttcttatcccaaagaagcaattagaccagaatgcttgatcgatggagaactaaaaggattcgggcaattgcatccccgcagccag

SEQ ID NO: 101 - DNA, 200 bp, Amaranthus graecizans
ctggctgcggggatgcaattgcccgaatccttttagttctccatcgatcaagcattctggtctaattgcttctttgggataagaaagggacactgctgcgactggaggatagtaaaatttagaaagagaatctgcagcaacatctgagagcggacgaagcaggctacttgcaatgtatgaagggacagtcatgacaaccg

SEQ ID NO: 102 - DNA, 200 bp, Amaranthus graecizans
cgggcaattgcatccccgcagccagggtgtggaaaccttgggaacaatttatagttcatctcttttccctggtcgagcaccacccggtaggaccttgatcttgagctacattggaggtgctacaaatcttggcatattacaaaagagtgaagatgaacttgcggagacagttgataaggatctcagaaaaattctgataa

SEQ ID NO: 103 - DNA, 200 bp, Amaranthus graecizans
ttatcagaatttttctgagatccttatcaactgtctccgcaagttcatcttcactcttttgtaatatgccaagatttgtagcacctccaatgtagctcaagatcaaggtcctaccgggtggtgctcgaccagggaaaagagatgaactataaattgttcccaaggtttccacaccctggctgcggggatgcaattgcccg

SEQ ID NO: 104 - DNA, 200 bp, Amaranthus graecizans
aaggatctcagaaaaattctgataaatccaaatgcgaaaggcagccgtgttctgggagtgagagtatggccaaaggcaatcccccaatttttagttggtcactttgatctgctagatgctgcaaaagctgctttggcaaatgctgggctaaaggggttgtttcttggtggtaattatgtatcaggtgttgccttggggag

SEQ ID NO: 105 - DNA, 200 bp, Amaranthus graecizans
ctccccaaggcaacacctgatacataattaccaccaagaaacaacccctttagcccagcatttgccaaagcagcttttgcagcatctagcagatcaaagtgaccaactaaaaattgggggattgcctttggccatactctcactcccagaacacggctgcctttcgcatttggatttatcagaatttttctgagatcctt

SEQ ID NO: 106 - DNA, 200 bp, Amaranthus graecizans
atgtatcaggtgttgccttggggaggtgtatagagggtgcttatgactctgcatctcaggtagtggatttcctctcacagtacaaagacaagtagtcagtagggctccagcatcctggttaagtaactttttgtagctgttgtaattcagatataaaatagcccacagtcaaacaagtttggaaagatgtaaaagcatga

SEQ ID NO: 107 - DNA, 200 bp, Amaranthus graecizans
tcatgcttttacatctttccaaacttgtttgactgtgggctattttatatctgaattacaacagctacaaaaagttacttaaccaggatgctggagccctactgactacttgtctttgtactgtgagaggaaatccactacctgagatgcagagtcataagcaccctctatacacctccccaaggcaacacctgatacat

SEQ ID NO: 108 - DNA, 200 bp, Amaranthus hybridus
gaagctaaacatcgtgttggaggtaatatcactaccatggagtccgatggctatatctgggaagagggtcctaatagtttccaaccctctgatcctgtgcttactatggcggttgacagtggattgaaagacgatttggtcttgggagatcctaatgcccctcgtttcgtgctctggaatggtaaattaaggcctgttcc

SEQ ID NO: 109 - DNA, 200 bp, Amaranthus hybridus
ggaacaggccttaatttaccattccagagcacgaaacgaggggcattaggatctcccaagaccaaatcgtctttcaatccactgtcaaccgccatagtaagcacaggatcagagggttggaaactattaggaccctcttcccagatatagccatcggactccatggtagtgatattacctccaacacgatgtttagcttc

SEQ ID NO: 110 - DNA, 200 bp, Amaranthus hybridus
ggaatggtaaattaaggcctgttccttccaaacctacggaccttcccttttttgatctcatgagctttcctggtaagattagggctggtcttggtgcacttggtcttcgtcgtcctcctcctccttcttcttatgaggaatctgttgaagaatttgtgcgccgtaatctcggcgatgaggtcttcgaacgcttgatcgaa

SEQ ID NO: 111 - DNA, 200 bp, Amaranthus hybridus
ttcgatcaagcgttcgaagacctcatcgccgagattacggcgcacaaattcttcaacagattcctcataagaagaaggaggaggaggacgacgaagaccaagtgcaccaagaccagccctaatcttaccaggaaagctcatgagatcaaaaaagggaaggtccgtaggtttggaaggaacaggccttaatttaccattcc

SEQ ID NO: 112 - DNA, 200 bp, Amaranthus hybridus
tgaggtcttcgaacgcttgatcgaacccttttgttctggtgtgtatgctggtgatcctacaaagttgagtatgaaagctgcatttggaaaggtctggaccttagagcaaaagggtggtagtatcatcgccggtacactcaaaactattcaggaaaggaagaataatcctccaccccctcgagacccccgccttcctaaac

SEQ ID NO: 113 - DNA, 200 bp, Amaranthus hybridus
gtttaggaaggcgggggtctcgagggggtggaggattattcttcctttcctgaatagttttgagtgtaccggcgatgatactaccacccttttgctctaaggtccagacctttccaaatgcagctttcatactcaactttgtaggatcaccagcatacacaccagaacaaaagggttcgatcaagcgttcgaagacctca

SEQ ID NO: 114 - DNA, 200 bp, Amaranthus hybridus
cctcgagacccccgccttcctaaacctaagggccagactgttggatcctttaggaaagggctcattatgttacctaccgccattgctgctaggcttggcagtaaagtcaaactatcgtggacactttctaatattgataagtcgctcaatggtgaatacattctcacttatcaaacacccgatggaccggtttctgttag

SEQ ID NO: 115 - DNA, 200 bp, Amaranthus hybridus
ctaacagaaaccggtccatcgggtgtttgataagtgagaatgtattcaccattgagcgacttatcaatattagaaagtgtccacgatagtttgactttactgccaagcctagcagcaatggcggtaggtaacataatgagccctttcctaaaggatccaacagtctggcccttaggtttaggaaggcgggggtctcgagg

SEQ ID NO: 116 - DNA, 200 bp, Amaranthus hybridus
cacccgatggaccggtttctgttaggaccaaagcggttgtcatgactgtcccttcatacattgcaagtagcctgcttcgtccgctctcagatgttgctgcagattctctttctaagttttactatccaccagtcgcagcagtgtccctttcttatcccaaagaagcaattagaccagaatgcttgatcgatggagaacta

SEQ ID NO: 117 - DNA, 200 bp, Amaranthus hybridus
tagttctccatcgatcaagcattctggtctaattgcttctttgggataagaaagggacactgctgcgactggtggatagtaaaacttagaaagagaatctgcagcaacatctgagagcggacgaagcaggctacttgcaatgtatgaagggacagtcatgacaaccgctttggtcctaacagaaaccggtccatcgggtg

SEQ ID NO: 118 - DNA, 200 bp, Amaranthus hybridus
agaatgcttgatcgatggagaactaaaaggattcgggcaattgcatccccgcagccagggtgtggaaaccttgggaacaatttatagttcatctcttttcccttggttcgagcaccacccggtaggaccttgatcttgagctacattggaggtgctacaaatgttggaatattacaaaagagtgaagatgaacttgcgga

SEQ ID NO: 119 - DNA, 200 bp, Amaranthus hybridus
tccgcaagttcatcttcactcttttgtaatattccaacatttgtagcacctccaatgtagctcaagatcaaggtcctaccgggtggtgctcgaaccaagggaaaagagatgaactataaattgttcccaaggtttccacaccctggctgcggggatgcaattgcccgaatccttttagttctccatcgatcaagcattct

SEQ ID NO: 120 - DNA, 200 bp, Amaranthus lividus
tagattgttgagagggaatgggcaattaagtggaatcccatttccttaaactcagctggtgtatgtaatggtgtctttccaccttcaatcatgtttgcaattctcaaacctttaacatctctaacaacctcttttagctcttctatgttggctggtgcctcaacaaatgtggcatcagcccctgcctctctgtaaagatt

SEQ ID NO: 121 - DNA, 200 bp, Amaranthus lividus
aatctttacagagaggcaggggctgatgccacatttgttgaggcaccagccaacatagaagagctaaaagaggttgttagagatgttaaaggtttgagaattgcaaacatgattgaaggtggaaagacaccattacatacaccagctgagtttaaggaaatgggattccacttaattgcccattccctctcaacaatcta

SEQ ID NO: 122 - DNA, 200 bp, Amaranthus lividus
cagcccctgcctctctgtaaagattagcacgtctaatagcttcttgaagaccgtgaggtgcacgagcatcagtccttgcaaccaagaagaaatcagattcaccaatggcttcccttgctgcagcgatcttaagggcgtgctcctctgcaggaacaactgccttaccacgcatgtgaccacacttctttggccatacttga

SEQ ID NO: 123 - DNA, 200 bp, Amaranthus lividus
tcaagtatggccaaagaagtgtggtcacatgcgtggtaaggcagttgttcctgcagaggagcacgcccttaagatcgctgcagcaagggaagccattggtgaatctgatttcttcttggttgcaaggactgatgctcgtgcacctcacggtcttcaagaagctattagacgtgctaatctttacagagaggcaggggctg

SEQ ID NO: 124 - DNA, 200 bp, Amaranthus lividus
accacacttctttggccatacttgatcctcaaggaaaacacccttggcaccagctgcgatcaagtctttgatgaacctttgaacattaagaggaccaccaccaccggtgtctccgtcaacaataacacacaaactaggagcagctgccgtaattctgcgaacaacatctaccacttctgcagttgtaagcaagccaaagt

SEQ ID NO: 125 - DNA, 200 bp, Amaranthus lividus
actttggcttgcttacaactgcagaagtggtagatgttgttcgcagaattacggcagctgctcctagtttgtgtgttattgttgacggagacaccggtggtggtggtcctcttaatgttcaaaggttcatcaaagacttgatcgcagctggtgccaagggtgttttccttgaggatcaagtatggccaaagaagtgtggt

SEQ ID NO: 126 - DNA, 200 bp, Amaranthus lividus
tctgcagttgtaagcaagccaaagtcgggcaagccaagaagagcagcggaaacaccaaaaccggagacaaagcaagctttgaagccggttttagcgcaaatggcggcggagaaagcgtcttggattccgggcattaaaattggtccctcctcggcgatcagacggtgcattgtggtctttccgactgcctcaagagaacc

SEQ ID NO: 127 - DNA, 200 bp, Amaranthus lividus
ggttctcttgaggcagtcggaaagaccacaatgcaccgtctgatcgccgaggagggaccaattttaatgcccggaatccaagacgctttctccgccgccatttgcgctaaaaccggcttcaaagcttgctttgtctccggttttggtgtttccgctgctcttcttggcttgcccgactttggcttgcttacaactgcaga

SEQ ID NO: 128 - DNA, 200 bp, Amaranthus lividus
tctttccgactgcctcaagagaacccatttttgtttctaataatacaatttaggaattaaggaaggaggtgatgatgagttgatagaactacttagtgtgtaattgttggagctggtatcagtggactttgcattgcgcaggctctttctaccaaacacattcaatccaatctcaatttcattgtcactgaagctaaaca

SEQ ID NO: 129 - DNA, 200 bp, Amaranthus lividus
tgtttagcttcagtgacaatgaaattgagattggattgaatgtgtttggtagaaagagcctgcgcaatgcaaagtccactgataccagctccaacaattacacactaagtagttctatcaactcatcatcacctccttccttaattcctaaattgtattattagaaacaaaaatgggttctcttgaggcagtcggaaaga

SEQ ID NO: 130 - DNA, 200 bp, Amaranthus lividus
atttcattgtcactgaagctaaacatcgtgttggaggtaatattactaccatggagtccgatggctatatctgggaagagggtcctaatagtttccaaccctctgatcctgtgcttactatggcggttgacagtggattgaaagacgatttggttttgggagatcctgatgcccctcgtttcgtgctctggaatggtaaa

SEQ ID NO: 131 - DNA, 200 bp, Amaranthus lividus
tttaccattccagagcacgaaacgaggggcatcaggatctcccaaaaccaaatcgtctttcaatccactgtcaaccgccatagtaagcacaggatcagagggttggaaactattaggaccctcttcccagatatagccatcggactccatggtagtaatattacctccaacacgatgtttagcttcagtgacaatgaaat

SEQ ID NO: 132 - DNA, 200 bp, Amaranthus lividus
tcgtttcgtgctctggaatggtaaattaaggcctgttccttctaaacctacggaccttcccttttttgatctcatgagctttcctggtaagattagggctggtcttggtgcacttggtcttcgtcctcctcctcctcctccttcttatgaggaatctgttgaagaatttgtgcgccgtaatctcggcgatgaggtcttcg

SEQ ID NO: 133 - DNA, 200 bp, Amaranthus lividus
cgaagacctcatcgccgagattacggcgcacaaattcttcaacagattcctcataagaaggaggaggaggaggaggacgaagaccaagtgcaccaagaccagccctaatcttaccaggaaagctcatgagatcaaaaaagggaaggtccgtaggtttagaaggaacaggccttaatttaccattccagagcacgaaacga

SEQ ID NO: 134 - DNA, 200 bp, Amaranthus lividus
cgtaatctcggcgatgaggtcttcgaacgcttaatcgaacccttttgttctggtgtgtatgctggtgatcctacaaagttgagtatgaaagctgcatttggaaaggtctggaccttagagcaaaagggtggtagtatcatcgccggtacactcaaatctattcaggaaaggaagaataatcctccaccccctcgagaccc

SEQ ID NO: 135 - DNA, 200 bp, Amaranthus lividus
gggtctcgagggggtggaggattattcttcctttcctgaatagatttgagtgtaccggcgatgatactaccacccttttgctctaaggtccagacctttccaaatgcagctttcatactcaactttgtaggatcaccagcatacacaccagaacaaaagggttcgattaagcgttcgaagacctcatcgccgagattacg

SEQ ID NO: 136 - DNA, 200 bp, Amaranthus lividus
ataatcctccaccccctcgagacccccgccttcctaaacctaagggccagactgttggatcctttaggaaagggctcattatgttacctaccgccattgctgctaggcttggcagtaaagtcaaactatcgtggacactttctaatattgataagtcgctcaatggtgaatacaatctcacttatcaaacacccgatgga

SEQ ID NO: 137 - DNA, 200 bp, Amaranthus lividus
tccatcgggtgtttgataagtgagattgtattcaccattgagcgacttatcaatattagaaagtgtccacgatagtttgactttactgccaagcctagcagcaatggcggtaggtaacataatgagccctttcctaaaggatccaacagtctggcccttaggtttaggaaggcgggggtctcgagggggtggaggattat

SEQ ID NO: 138 - DNA, 200 bp, Amaranthus lividus
tctcacttatcaaacacccgatggaccggtttctgttaggaccaaagcggttgtcatgactgtaccttcatacattgcaagtagcctgcttcgtccactctcagatgttgctgcagattctctttctaagttttactatccaccagtcgcagcagtgtccctttcttatcccaaggaagcaattagaccagaatgcttga

SEQ ID NO: 139 - DNA, 200 bp, Amaranthus lividus
tcaagcattctggtctaattgcttccttgggataagaaagggacactgctgcgactggtggatagtaaaacttagaaagagaatctgcagcaacatctgagagtggacgaagcaggctacttgcaatgtatgaaggtacagtcatgacaaccgctttggtcctaacagaaaccggtccatcgggtgtttgataagtgaga

SEQ ID NO: 140 - DNA, 200 bp, Amaranthus lividus
gaagcaattagaccagaatgcttgatcgatggagaactaaaaggattcgggcaattgcatccccgcagccagggtgtggaaaccttgggaacaatttatagttcatctcttttccctggtcgagcaccacccggtaggaccttgatcttgagctacattggaggtgctacaaatgttggaatattacaaaagagtgaaga

SEQ ID NO: 141 - DNA, 200 bp, Amaranthus lividus
tcttcactcttttgtaatattccaacatttgtagcacctccaatgtagctcaagatcaaggtcctaccgggtggtgctcgaccagggaaaagagatgaactataaattgttcccaaggtttccacaccctggctgcggggatgcaattgcccgaatccttttagttctccatcgatcaagcattctggtctaattgcttc

SEQ ID NO: 142 - DNA, 200 bp, Amaranthus lividus
ttggaatattacaaaagagtgaagatgaacttgcggagacagttgataaggatctcagaaaaattctgataaatccaaatgcgaaaggcagccgtgttctgggagtgagagtatggccaaaggcaatcccccaatttttagttggtcactttgatctgctagatgctgcaaaagctggtttggcaaatgctgggctaaag

SEQ ID NO: 143 - DNA, 200 bp, Amaranthus lividus
ctttagcccagcatttgccaaaccagcttttgcagcatctagcagatcaaagtgaccaactaaaaattgggggattgcctttggccatactctcactcccagaacacggctgcctttcgcatttggatttatcagaatttttctgagatccttatcaactgtctccgcaagttcatcttcactcttttgtaatattccaa

SEQ ID NO: 144 - DNA, 200 bp, Amaranthus lividus
tggtttggcaaatgctgggctaaaggggttgtttcttggtggtaattatgtatcaggtgttgccttggggaggtgtatagagggtgcttatgactctgcatctcaggtagtggatttcctctcacagtacaaagacaagtagtcaatagggctccaccttcctggttaactaactttttgtagctgttgtaatttgtatc

SEQ ID NO: 145 - DNA, 200 bp, Amaranthus lividus
gatacaaattacaacagctacaaaaagttagttaaccaggaaggtggagccctattgactacttgtctttgtactgtgagaggaaatccactacctgagatgcagagtcataagcaccctctatacacctccccaaggcaacacctgatacataattaccaccaagaaacaacccctttagcccagcatttgccaaacca

SEQ ID NO: 146 - DNA, 200 bp, Amaranthus palmeri
aatccttgatttgaagataggataaccagagagagtgcaagagagatgagtgccatggcgttatcgagcagcattctacaatgtccgccgcactccgacatctctttccgcttttctgcttatacaccaacccgctcccccatcttcttcggaagacctcgaaaattatcatatatccattgttccacaagctcaagctc

SEQ ID NO: 147 - DNA, 200 bp, Amaranthus palmeri
gagcttgagcttgtggaacaatggatatatgataattttcgaggtcttccgaagaagatgggggagcgggttggtgtataagcagaaaagcggaaagagatgtcggagtgcggcggacattgtagaatgctgctcgataacgccatggcactcatctctcttgcactctctctggttatcctatcttcaaatcaaggatt

SEQ ID NO: 148 - DNA, 200 bp, Amaranthus palmeri
tccattgttccacaagctcaagctcaactgccaattaccagaacacgattacgacccaaggagaaggagataaagtattggattgtgtaattgttggagctggtatcagtggactttgcattgctcaggctctttctaccaaacacattcaatccaatctcaatttcattgtcactgaagctaaaaatcgtgttggaggt

SEQ ID NO: 149 - DNA, 200 bp, Amaranthus palmeri
acctccaacacgatttttagcttcagtgacaatgaaattgagattggattgaatgtgtttggtagaaagagcctgagcaatgcaaagtccactgataccagctccaacaattacacaatccaatactttatctccttctccttgggtcgtaatcgtgttctggtaattggcagttgagcttgagcttgtggaacaatgga

SEQ ID NO: 150 - DNA, 200 bp, Amaranthus palmeri
tgaagctaaaaatcgtgttggaggtaatatcactaccatggagtccgatggctatatctgggaagagggtcctaatagtttccaaccctccgatcctgtgcttactatggcggttgacagtggattgaaagatgatttggtcttgggagatcctaatgctcctcgttttgtgctctggaatggtaaattaaggcctgttc

SEQ ID NO: 151 - DNA, 200 bp, Amaranthus palmeri
gaacaggccttaatttaccattccagagcacaaaacgaggagcattaggatctcccaagaccaaatcatctttcaatccactgtcaaccgccatagtaagcacaggatcggagggttggaaactattaggaccctcttcccagatatagccatcggactccatggtagtgatattacctccaacacgatttttagcttca

SEQ ID NO: 152 - DNA, 200 bp, Amaranthus palmeri
tggaatggtaaattaaggcctgttccttccaaacctacggaccttcccttttttgatctcatgagctttcctggtaagattagggctggtcttggtgcacttggtcttcgtccttctcctcctcctccttcttatgaggaatctgttgaagaatttgtgcgccgtaatctcggcgatgaggtcttcgaacgcttgatcga

SEQ ID NO: 153 - DNA, 200 bp, Amaranthus palmeri
tcgatcaagcgttcgaagacctcatcgccgagattacggcgcacaaattcttcaacagattcctcataagaaggaggaggaggagaaggacgaagaccaagtgcaccaagaccagccctaatcttaccaggaaagctcatgagatcaaaaaagggaaggtccgtaggtttggaaggaacaggccttaatttaccattcca

SEQ ID NO: 154 - DNA, 200 bp, Amaranthus palmeri
atgaggtcttcgaacgcttgatcgaacccttttgttctggtgtgtatgctggtgatccttcaaagttgagtatgaaagctgcatttggaaaggtctggaccttagagcaaaagggtggtagtatcatcgccggtacactcaaaactattcaggaaaggaagaataatcctccaccgcctcgagacccccgccttcctaaa

SEQ ID NO: 155 - DNA, 200 bp, Amaranthus palmeri
tttaggaaggcgggggtctcgaggcggtggaggattattcttcctttcctgaatagttttgagtgtaccggcgatgatactaccacccttttgctctaaggtccagacctttccaaatgcagctttcatactcaactttgaaggatcaccagcatacacaccagaacaaaagggttcgatcaagcgttcgaagacctcat

SEQ ID NO: 156 - DNA, 200 bp, Amaranthus palmeri
gcctcgagacccccgccttcctaaacctaagggccagactgttggatcctttaggaaagggctcattatgttacctaccgccattgctgctaggcttggcagtaaagtcaaactatcgtggacactttctaatattgataagtcgctcaatggtgaatacaatctcacttatcaaacacccgatggaccggtttctgtta

SEQ ID NO: 157 - DNA, 200 bp, Amaranthus palmeri
taacagaaaccggtccatcgggtgtttgataagtgagattgtattcaccattgagcgacttatcaatattagaaagtgtccacgatagtttgactttactgccaagcctagcagcaatggcggtaggtaacataatgagccctttcctaaaggatccaacagtctggcccttaggtttaggaaggcgggggtctcgaggc

SEQ ID NO: 158 - DNA, 200 bp, Amaranthus palmeri
acacccgatggaccggtttctgttaggaccaaagcggttgtcatgactgtcccttcatacattgcaagtagcctgcttcgtccgctctcatgatgttgctgcagattctctttctaaattttactatccaccagtcgcagcagtgtccctttcttatcccaaagaagcaattagaccagaatgcttgatcgatggagaac

SEQ ID NO: 159 - DNA, 200 bp, Amaranthus palmeri
gttctccatcgatcaagcattctggtctaattgcttctttgggataagaaagggacactgctgcgactggtggatagtaaaatttagaaagagaatctgcagcaacatcatgagagcggacgaagcaggctacttgcaatgtatgaagggacagtcatgacaaccgctttggtcctaacagaaaccggtccatcgggtgt

SEQ ID NO: 160 - DNA, 200 bp, Amaranthus palmeri
ccagaatgcttgatcgatggagaactaaaaggattcgggcaattgcatcccgcagccagggtgtggaaaccttgggaacaatttatagttcatctcttttccctggtcgagcaccacctggtaggaccttgatcttgagctacattggaggtgctacaaatgttggcatattacaaaagagtgaagatgaacttgcggag

SEQ ID NO: 161 - DNA, 200 bp, Amaranthus palmeri
ctccgcaagttcatcttcactcttttgtaatatgccaacatttgtagcacctccaatgtagctcaagatcaaggtcctaccaggtggtgctcgaccagggaaaagagatgaactataaattgttcccaaggtttccacaccctggctgcgggatgcaattgcccgaatccttttagttctccatcgatcaagcattctgg

SEQ ID NO: 162 - DNA, 200 bp, Amaranthus palmeri
aaagagtgaagatgaacttgcggagacagttgataaggatctcagaaaaattctgataaatccaaatgcgaaaggcagccgtgttctgggagtgagagtatggccaaaggcaatcccccaatttttagtaggtcattttgatctgctagatgctgcaaaagcgggtttggcaaatgctggactaaaggggttgtttcttg

SEQ ID NO: 163 - DNA, 200 bp, Amaranthus palmeri
caagaaacaacccctttagtccagcatttgccaaacccgcttttgcagcatctagcagatcaaaatgacctactaaaaattgggggattgcctttggccatactctcactcccagaacacggctgcctttcgcatttggatttatcagaatttttctgagatccttatcaactgtctccgcaagttcatcttcactcttt

SEQ ID NO: 164 - DNA, 200 bp, Amaranthus palmeri
gctggactaaaggggttgtttcttggtggtaattatgtatcaggtgttgccttggggaggtgtatagagggtgcttatgactctgcatctcaggttgtggatttcctctcacagtacaaagacaagtagtcatcctgattaactaactttttgtagctgttgtaatttgtatcatgtaatattattatttattcagatgt

SEQ ID NO: 165 - DNA, 200 bp, Amaranthus palmeri
acatctgaataaataataatattacatgatacaaattacaacagctacaaaaagttagttaatcaggatgactacttgtctttgtactgtgagaggaaatccacaacctgagatgcagagtcataagcaccctctatacacctccccaaggcaacacctgatacataattaccaccaagaaacaacccctttagtccagc

SEQ ID NO: 166 - DNA, 200 bp, Amaranthus palmeri
acataaaaccgctacatggaggcacggttttgtgtcaaatgtaaaccactactccatgtagcggtttggtgcacatacttttcaactctcagtgtgttgctgacgtggacggtagtgcgggaattattttacaaagtaacgtaaagtgggaattttttttaaataagctgcattttgggcaaagactctacttttacttt

SEQ ID NO: 167 - DNA, 200 bp, Amaranthus palmeri
aaagtaaaagtagagtctttgcccaaaatgcagcttatttaaaaaaaattcccactttacgttactttgtaaaataattcccgcactaccgtccacgtcagcaacacactgagagttgaaaagtatgtgcaccaaaccgctacatggagtagtggtttacatttgacacaaaaccgtgcctccatgtagcggttttatgt

SEQ ID NO: 168 - DNA, 200 bp, Amaranthus palmeri
tgggcaaagactctacttttacttttaattttatttttaattttaataaagaaggaagaaaaaaaacaaatgtatttatggataaagaatccttgatttgaagataggataaccagagagagggcaagagagatgagtgccatggcgttatcgagcagcattctacaatgtctgccgcactccgacatctctttccgctt

SEQ ID NO: 169 - DNA, 200 bp, Amaranthus palmeri
aagcggaaagagatgtcggagtgcggcagacattgtagaatgctgctcgataacgccatggcactcatctctcttgccctctctctggttatcctatcttcaaatcaaggattctttatccataaatacatttgttttttttcttccttctttattaaaattaaaaataaaattaaaagtaaaagtagagtctttgccca

SEQ ID NO: 170 - DNA, 200 bp, Amaranthus palmeri
cgcactccgacatctctttccgcttttctgcttatacaccaacccgctcccccatcttcttcggaagaccacgaaaattatcatatatccattgttccacaagctcaagctcaactgccaattaccagaacacgattacgacccaaggagaaggagataaagtattggattgtgtaattgttggagctggtatcagtgga

SEQ ID NO: 171 - DNA, 200 bp, Amaranthus palmeri
tccactgataccagctccaacaattacacaatccaatactttatctccttctccttgggtcgtaatcgtgttctggtaattggcagttgagcttgagcttgtggaacaatggatatatgataattttcgtggtcttccgaagaagatgggggagcgggttggtgtataagcagaaaagcggaaagagatgtcggagtgcg

SEQ ID NO: 172 - DNA, 200 bp, Amaranthus palmeri
aattgttggagctggtatcagtggactttgcattgctcaggctctttctactaaacacattcaatccaatctcaatttcattgtcactgaagctaaaaatcgtgttggaggtaatatcactaccatggagtccgatggctatatctgggaagagggtcctaatagtttccaaccctccgatcctgtgcttactatggcgg

SEQ ID NO: 173 - DNA, 200 bp, Amaranthus palmeri
ccgccatagtaagcacaggatcggagggttggaaactattaggaccctcttcccagatatagccatcggactccatggtagtgatattacctccaacacgatttttagcttcagtgacaatgaaattgagattggattgaatgtgtttagtagaaagagcctgagcaatgcaaagtccactgataccagctccaacaatt

SEQ ID NO: 174 - DNA, 200 bp, Amaranthus palmeri
tccgatcctgtgcttactatggcggtaaactcattcttctctctttctccaatttttgatcattctattcaattttccccttattgagtcaaaatcaaattccaggttgacagtggattgaaagatgatttggtcttgggagatcctaatgctcctcgttttgtgctctggaatggtaaattaaggcctgttccttccaa

SEQ ID NO: 175 - DNA, 200 bp, Amaranthus palmeri
ttggaaggaacaggccttaatttaccattccagagcacaaaacgaggagcattaggatctcccaagaccaaatcatctttcaatccactgtcaacctggaatttgattttgactcaataaggggaaaattgaatagaatgatcaaaaattggagaaagagagaagaatgagtttaccgccatagtaagcacaggatcgga

SEQ ID NO: 176 - DNA, 200 bp, Amaranthus palmeri
gtaaattaaggcctgttccttccaaacctacggaccttcccttttttgatctcatgagctttcctggtaagattagggctggtcttggtgcacttggtcttcgtccttctccccctcctccttcttatgaggaatctgttgaagagtttgtgcgccgtaatctcggcgatgaggtcttcgaacgcttgatcgaacccttt

SEQ ID NO: 177 - DNA, 200 bp, Amaranthus palmeri
aaagggttcgatcaagcgttcgaagacctcatcgccgagattacggcgcacaaactcttcaacagattcctcataagaaggaggagggggagaaggacgaagaccaagtgcaccaagaccagccctaatcttaccaggaaagctcatgagatcaaaaaagggaaggtccgtaggtttggaaggaacaggccttaatttac

SEQ ID NO: 178 - DNA, 200 bp, Amaranthus palmeri
cttcgaacgcttgatcgaacccttttgttctggtacctaccctgtttaatttttcagttttcccccttttttctctactactcctactttattgattcttatctatgagtgttctatgggaattgacattaattgttcaggtgtgtatgctggtgatccttcaaagttgagtatgaaagctgcatttggaaaggtctgga

SEQ ID NO: 179 - DNA, 200 bp, Amaranthus palmeri
tccagacctttccaaatgcagctttcatactcaactttgaaggatcaccagcatacacacctgaacaattaatgtcaattcccatagaacactcatagataagaatcaataaagtaggagtagtagagaaaaaagggggaaaactgaaaaattaaacagggtaggtaccagaacaaaagggttcgatcaagcgttcgaag

SEQ ID NO: 180 - DNA, 200 bp, Amaranthus palmeri
aaagctgcatttggaaaggtctggaccttagagcaaaagggtggtagtatcatcgccggtacactcaaaactattcaggaaaggaagaataatcctccaccgcctcgagacccgtccgtaatcaccattactcattgctttccttcaccttgtatcttaccttaatatacatgtatttaattgataatgtcacattgcct

SEQ ID NO: 181 - DNA, 200 bp, Amaranthus palmeri
aggcaatgtgacattatcaattaaatacatgtatattaaggtaagatacaaggtgaaggaaagcaatgagtaatggtgattacggacgggtctcgaggcggtggaggattattcttcctttcctgaatagttttgagtgtaccggcgatgatactaccacccttttgctctaaggtccagacctttccaaatgcagcttt

SEQ ID NO: 182 - DNA, 200 bp, Amaranthus palmeri
tttaattgataatgtcacattgcctcatttgcagccgccttcctaaacctaagggccagactgttggatcctttaggaaagggctcattatgttacctaccgccattgctgctaggtatcttttgactctcaaatcttaaatatttctcatcttttccttctgctaatactagtatgtttaccatctttttattttttta

SEQ ID NO: 183 - DNA, 200 bp, Amaranthus palmeri
taaaaaaataaaaagatggtaaacatactagtattagcagaaggaaaagatgagaaatatttaagatttgagagtcaaaagatacctagcagcaatggcggtaggtaacataatgagccctttcctaaaggatccaacagtctggcccttaggtttaggaaggcggctgcaaatgaggcaatgtgacattatcaattaaa

SEQ ID NO: 184 - DNA, 200 bp, Amaranthus palmeri
tgtttaccatctttttatttttttaggcttggcagtaaagtcaaactatcgtggacactttctaatattgataagtcgctcaatggtgaatacaatctcacttatcaaacacccgatggaccggtttctgttaggaccaaagcggttgtcatgactgtcccttcatacattgcaagtagcctgcttcgtccgctctcagt

SEQ ID NO: 185 - DNA, 200 bp, Amaranthus palmeri
actgagagcggacgaagcaggctacttgcaatgtatgaagggacagtcatgacaaccgctttggtcctaacagaaaccggtccatcgggtgtttgataagtgagattgtattcaccattgagcgacttatcaatattagaaagtgtccacgatagtttgactttactgccaagcctaaaaaaataaaaagatggtaaaca

SEQ ID NO: 186 - DNA, 200 bp, Amaranthus palmeri
gtagcctgcttcgtccgctctcagtgagtatcattctttccttcatttcttttcgtttattgctgtccaatgtcttgttaaacaccagtttggccttgtgctcgtgaattatggctacaatgttaactgattctgtgattcaggcactgtgggagatgcctaagtttctaaaacctctgcgcataatgtttgtttggatg

SEQ ID NO: 187 - DNA, 200 bp, Amaranthus palmeri
catccaaacaaacattatgcgcagaggttttagaaacttaggcatctcccacagtgcctgaatcacagaatcagttaacattgtagccataattcacgagcacaaggccaaactggtgtttaacaagacattggacagcaataaacgaaaagaaatgaaggaaagaatgatactcactgagagcggacgaagcaggctac

SEQ ID NO: 188 - DNA, 200 bp, Amaranthus palmeri
tctgcgcataatgtttgtttggatgttaggaattgcattgaaaaattgcttttgtgatgttgatgttaataccaattacaagtgtgttcttcaacttctgcaataccttgttcgagtgagcttgagggggtttagattagtgtccaatgtgaaactagcaaatgaactccaagcgctgggataggtccttgggatggagc

SEQ ID NO: 189 - DNA, 200 bp, Amaranthus palmeri
gctccatcccaaggacctatcccagcgcttggagttcatttgctagtttcacattggacactaatctaaaccccctcaagctcactcgaacaaggtattgcagaagttgaagaacacacttgtaattggtattaacatcaacatcacaaaagcaatttttcaatgcaattcctaacatccaaacaaacattatgcgcaga

SEQ ID NO: 190 - DNA, 200 bp, Amaranthus palmeri
ctgggataggtccttgggatggagcccctgatacccaagacagtattcaaaccctctaagtagagtgagagatcaaggaaagaaactgggtggttcctcaaatcgtaaaaaatgaatacagtgtcatgattgctaatcttatcacaaatcgtaaaaaatgaattatggtcgattttggactatttttgggtcattttgag

SEQ ID NO: 191 - DNA, 200 bp, Amaranthus palmeri
ctcaaaatgacccaaaaatagtccaaaatcgaccataattcattttttacgatttgtgataagattagcaatcatgacactgtattcattttttacgatttgaggaaccacccagtttctttccttgatctctcactctacttagagggtttgaatactgtcttgggtatcaggggctccatcccaaggacctatcccag

SEQ ID NO: 192 - DNA, 200 bp, Amaranthus palmeri
tggactatttttgggtcattttgagtgaatctcaaacttaaaaagcgagtcttctagcagttcttgttacagcggggcatacataggtaggaatttggttttttactatttgagccttttgactgttgtggccggtaatatggaatagtctagcacttctgcgtgtgtacaactagtatttattgtaattatgtgatcgc

SEQ ID NO: 193 - DNA, 200 bp, Amaranthus palmeri
gcgatcacataattacaataaatactagttgtacacacgcagaagtgctagactattccatattaccggccacaacagtcaaaaggctcaaatagtaaaaaaccaaattcctacctatgtatgccccgctgtaacaagaactgctagaagactcgctttttaagtttgagattcactcaaaatgacccaaaaatagtcca

SEQ ID NO: 194 - DNA, 200 bp, Amaranthus palmeri
gtatttattgtaattatgtgatcgcacttaactctcagataaaaccttaagcactaacattttgttttggttgaaggaatcaggaggaaagaaaattgagggatttgttggtatatagattcctttgtttggataacaaaattggagtggagagatttggaaggaagaattttatagggattagttcccattacacttat

SEQ ID NO: 195 - DNA, 200 bp, Amaranthus palmeri
ataagtgtaatgggaactaatccctataaaattcttccttccaaatctctccactccaattttgttatccaaacaaaggaatctatataccaacaaatccctcaattttctttcctcctgattccttcaaccaaaacaaaatgttagtgcttaaggttttatctgagagttaagtgcgatcacataattacaataaatac

SEQ ID NO: 196 - DNA, 200 bp, Amaranthus palmeri
attatatgtcatgtaatataaatagaaaattattatttaaataattaatttcaaactttgtatcaataaaacacttaattttttgattattagagtgtatatgaaaaatatgtaaaaaaaagtcgtacataagaaaatttcattgtaattaagactaaatttgatgaatcgattcgtaaaattgctctatgatcctacaa

SEQ ID NO: 197 - DNA, 200 bp, Amaranthus palmeri
ttgtaggatcatagagcaattttacgaatcgattcatcaaatttagtcttaattacaatgaaattttcttatgtacgacttttttttacatatttttcatatacactctaataatcaaaaaattaagtgttttattgatacaaagtttgaaattaattatttaaataataattttctatttatattacatgacatataat

SEQ ID NO: 198 - DNA, 200 bp, Amaranthus palmeri
gtaaaattgctctatgatcctacaacccacttatttatttcaattaggactgtaattaagtttaaatttacattagttgaattattgccttttatgagagatgtggtatcgtatgctatctaaaggctaaaactattaagtcgatttaaaatctatccaaattttatacttaattgaactaggttgaattgaacggagaa

SEQ ID NO: 199 - DNA, 200 bp, Amaranthus palmeri
ttctccgttcaattcaacctagttcaattaagtataaaatttggatagattttaaatcgacttaatagttttagcctttagatagcatacgataccacatctctcataaaaggcaataattcaactaatgtaaatttaaacttaattacagtcctaattgaaataaataagtgggttgtaggatcatagagcaattttac

SEQ ID NO: 200 - DNA, 200 bp, Amaranthus palmeri
gaactaggttgaattgaacggagaattaatcaaaaatgtaccacccttgaatcactatcaatattaaagcaaaccaactttaatccataaatgaaaatcaacttagtcaaatcacatatgaacccgtcaatcatgccaaaaactctgagagtgtttgatattataacttattagaaaattttaacttatttgacgcaaat

SEQ ID NO: 201 - DNA, 200 bp, Amaranthus palmeri
atttgcgtcaaataagttaaaattttctaataagttataatatcaaacactctcagagtttttggcatgattgacgggttcatatgtgatttgactaagttgattttcatttatggattaaagttggtttgctttaatattgatagtgattcaagggtggtacatttttgattaattctccgttcaattcaacctagttc

SEQ ID NO: 202 - DNA, 200 bp, Amaranthus palmeri
aaattttaacttatttgacgcaaatagacggataagtgttctaaccatctagctctagtgtttcgcttaataaaaataaataatttttaaacatgctcctataaatcaactgatcaaaccggtttataaaatcaccaactaaatcgacccattcaaatcaaataccaactcggtcgtttgccaaacacttcgctatgact

SEQ ID NO: 203 - DNA, 200 bp, Amaranthus palmeri
agtcatagcgaagtgtttggcaaacgaccgagttggtatttgatttgaatgggtcgatttagttggtgattttataaaccggtttgatcagttgatttataggagcatgtttaaaaattatttatttttattaagcgaaacactagagctagatggttagaacacttatccgtctatttgcgtcaaataagttaaaattt

SEQ ID NO: 204 - DNA, 200 bp, Amaranthus palmeri
gtttgccaaacacttcgctatgacttcaatcaaacaaaatgcaacttgtttgctgctaccgacttaccgccttacccagtacgcggaaaagataatcaatgagaatcaaattcaaatcttgacaagataatatgattatcccattattatcaatttaattatgattaaccttttttaagataacctaataattcattgat

SEQ ID NO: 205 - DNA, 200 bp, Amaranthus palmeri
atcaatgaattattaggttatcttaaaaaaggttaatcataattaaattgataataatgggataatcatattatcttgtcaagatttgaatttgattctcattgattatcttttccgcgtactgggtaaggcggtaagtcggtagcagcaaacaagttgcattttgtttgattgaagtcatagcgaagtgtttggcaaac

SEQ ID NO: 206 - DNA, 200 bp, Amaranthus palmeri
taagataacctaataattcattgataagaatgattagcttgtttaatcaacttcaatttacaatttctaccttggaaaattcaaaccaaaaagtgtaaaagaattgatttggcagattgcgacaattggattgagaaattgacaaatttaaactgatcttatggtaattcaatccataacccacctttcaccaaaacttg

SEQ ID NO: 207 - DNA, 200 bp, Amaranthus palmeri
caagttttggtgaaaggtgggttatggattgaattaccataagatcagtttaaatttgtcaatttctcaatccaattgtcgcaatctgccaaatcaattcttttacactttttggtttgaattttccaaggtagaaattgtaaattgaagttgattaaacaagctaatcattcttatcaatgaattattaggttatctta

SEQ ID NO: 208 - DNA, 200 bp, Amaranthus palmeri
ataacccacctttcaccaaaacttgcattgccatcgccattgtcaatttccgccaagaactacccagtagctgtaatgggcaacatttctgagcgggaagaacccagtaagtcaacctttcttcatatatcttaagcaatcccttttgaactacactttcttttgatgattttacattctgaattgtttttattggggat

SEQ ID NO: 209 - DNA, 200 bp, Amaranthus palmeri
atccccaataaaaacaattcagaatgtaaaatcatcaaaagaaagtgtagttcaaaagggattgcttaagatatatgaagaaaggttgacttactgggttcttcccgctcagaaatgttgcccattacagctactgggtagttcttggcggaaattgacaatggcgatggcaatgcaagttttggtgaaaggtgggttat

SEQ ID NO: 210 - DNA, 200 bp, Amaranthus palmeri
attctgaattgtttttattggggattttcagcttctgcgaaaagggttgctgttgttggtgctggagttaggtaaattttatgttacttttccagaaagattgtgaaattttgctttgattgttctgaattttgatgggtttttgcataatgatttgtatttgggatgggcaaatttttcagaagatcatactacttttt

SEQ ID NO: 211 - DNA, 200 bp, Amaranthus palmeri
aaaaagtagtatgatcttctgaaaaatttgcccatcccaaatacaaatcattatgcaaaaacccatcaaaattcagaacaatcaaagcaaaatttcacaatctttctggaaaagtaacataaaatttacctaactccagcaccaacaacagcaacccttttcgcagaagctgaaaatccccaataaaaacaattcagaat

SEQ ID NO: 212 - DNA, 200 bp, Amaranthus palmeri
ttttcagaagatcatactactttttaacttgtgttttctgtagaattttattgattttctaaactgtttttgtgggattgttctagtggacttgctgctgcatataagctaaaatcccatggtttgagtgtgacattgtttgaagctgattctagagctggaggcaagcttaaaactgttaaaaaagatggttttatttg

SEQ ID NO: 213 - DNA, 200 bp, Amaranthus palmeri
caaataaaaccatcttttttaacagttttaagcttgcctccagctctagaatcagcttcaaacaatgtcacactcaaaccatgggattttagcttatatgcagcagcaagtccactagaacaatcccacaaaaacagtttagaaaatcaataaaattctacagaaaacacaagttaaaaagtagtatgatcttctgaaaa

SEQ ID NO: 214 - DNA, 200 bp, Amaranthus palmeri
ctgttaaaaaagatggttttatttgggatgagggggcaaatactatggtaatgtttatcaacaatgctggttttctgatatagaaccaattacttatttattaactggatttttggtcaaacctgtggttggcatgtcactttatgctatgattgtagacagaaagtgaggcagaggtgtcgagtttgatcgatgatctt

SEQ ID NO: 215 - DNA, 200 bp, Amaranthus palmeri
aagatcatcgatcaaactcgacacctctgcctcactttctgtctacaatcatagcataaagtgacatgccaaccacaggtttgaccaaaaatccagttaataaataagtaattggttctatatcagaaaaccagcattgttgataaacattaccatagtatttgccccctcatcccaaataaaaccatcttttttaacag

SEQ ID NO: 216 - DNA, 200 bp, Amaranthus palmeri
ggtgtcgagtttgatcgatgatcttgggcttcgtgagaagcaacagttggtaagttttccgtctaagcccattccctttgctctctaggtgcaaaaatacggtaatagtcatgatcgtggtaatgacatggtgatgcggtgacgggagttatgtgatcgctattccaactataggtcgaaaacatgatattttccttgtg

SEQ ID NO: 217 - DNA, 200 bp, Amaranthus palmeri
cacaaggaaaatatcatgttttcgacctatagttggaatagcgatcacataactcccgtcaccgcatcaccatgtcattaccacgatcatgactattaccgtatttttgcacctagagagcaaagggaatgggcttagacggaaaacttaccaactgttgcttctcacgaagcccaagatcatcgatcaaactcgacacc

SEQ ID NO: 218 - DNA, 200 bp, Amaranthus palmeri
tcgaaaacatgatattttccttgtgacgttccgaaatgcggtatttttacacctttacattgcggggaaaaataggtttagtttttttgaatacctttacaaggcggctgatgcgatgaagccttgtttttgcattatgtgctagaagcaaattattatatctttaattaatgtaatgtatcatcagcttaaaacagcct

SEQ ID NO: 219 - DNA, 200 bp, Amaranthus palmeri
aggctgttttaagctgatgatacattacattaattaaagatataataatttgcttctagcacataatgcaaaaacaaggcttcatcgcatcagccgccttgtaaaggtattcaaaaaaactaaacctatttttccccgcaatgtaaaggtgtaaaaataccgcatttcggaacgtcacaaggaaaatatcatgttttcga

SEQ ID NO: 220 - DNA, 200 bp, Amaranthus palmeri
atgtatcatcagcttaaaacagccttattgtacttcttaatctagttttgacttttgaggttgcttttacgagatccttataaattgctttttctgtcacagccaatttcacaaaataaaaggtacatagctagagatggtcttccggtgctagtaagtcctctgcattttcttttgacctctatgaacttctaacactg

SEQ ID NO: 221 - DNA, 200 bp, Amaranthus palmeri
cagtgttagaagttcatagaggtcaaaagaaaatgcagaggacttactagcaccggaagaccatctctagctatgtaccttttattttgtgaaattggctgtgacagaaaaagcaatttataaggatctcgtaaaagcaacctcaaaagtcaaaactagattaagaagtacaataaggctgttttaagctgatgatacat

SEQ ID NO: 222 - DNA, 200 bp, Amaranthus palmeri
tgacctctatgaacttctaacactggatactgagttgtatttgtattcgaggcaaattctatattttccaatctgtttcttattgacagttacttgcaacctttgcagctaccttcaaatcccgctgcactgctcacgagcaatttcctttcagcaaaatcaaaggttatttatgctaaaacatgtttgtttgttttttt

SEQ ID NO: 223 - DNA, 200 bp, Amaranthus palmeri
aaaaaaacaaacaaacatgttttagcataaataacctttgattttgctgaaaggaaattgctcgtgagcagtgcagcgggatttgaaggtagctgcaaaggttgcaagtaactgtcaataagaaacagattggaaaatatagaatttgcctcgaatacaaatacaactcagtatccagtgttagaagttcatagaggtca

SEQ ID NO: 224 - DNA, 200 bp, Amaranthus palmeri
ctaaaacatgtttgtttgtttttttttaacttagcttttggtgtatgcaataatttggtttctaaaactaagtgattgaccgaaaaggagggacaaaggacatagaattgcaaatttttgttcttgacgtatttttacttttagagcatccccttgtgtaaaacttttattttagagctgcaagaatttgttgcatcttt

SEQ ID NO: 225 - DNA, 200 bp, Amaranthus palmeri
aaagatgcaacaaattcttgcagctctaaaataaaagttttacacaaggggatgctctaaaagtaaaaatacgtcaagaacaaaaatttgcaattctatgtcctttgtccctccttttcggtcaatcacttagttttagaaaccaaattattgcatacaccaaaagctaagttaaaaaaaaacaaacaaacatgttttag

SEQ ID NO: 226 - DNA, 200 bp, Amaranthus palmeri
agctgcaagaatttgttgcatcttttgttatgatttaattttgatgcttttagctgcaacagtttgttgataaaaaggccactgcttttttctcagctgcaaattatgttggaaccatttctctggaaaaaacgcaatgctactgagctttctgatgagcatgttcaggaaaggcaagtgcccttgctctatctatactg

SEQ ID NO: 227 - DNA, 200 bp, Amaranthus palmeri
cagtatagatagagcaagggcacttgcctttcctgaacatgctcatcagaaagctcagtagcattgcgttttttccagagaaatggttccaacataatttgcagctgagaaaaaagcagtggcctttttatcaacaaactgttgcagctaaaagcatcaaaattaaatcataacaaaagatgcaacaaattcttgcagct

SEQ ID NO: 228 - DNA, 200 bp, Amaranthus palmeri
aagtgcccttgctctatctatactgatggaaaggattatcgctgaatttaccttctactgaaacatcaataaaatacttcattattagcatcaaaatactccctccatccttctggttttgctggactttccctatgaaggtgttcaaggagtagcttgctacctttcaagatagggtagtggttgccttctcgcaaaat

SEQ ID NO: 229 - DNA, 200 bp, Amaranthus palmeri
attttgcgagaaggcaaccactaccctatcttgaaaggtagcaagctactccttgaacaccttcatagggaaagtccagcaaaaccagaaggatggagggagtattttgatgctaataatgaagtattttattgatgtttcagtagaaggtaaattcagcgataatcctttccatcagtatagatagagcaagggcactt

SEQ ID NO: 230 - DNA, 200 bp, Amaranthus palmeri
ggtagtggttgccttctcgcaaaatttcagtcactcgttttcctctcctaattcaagccatactttttatggttcctccacacaactcttgctaaatttgaaaagtagcaaagaggaagtgagcaaaatcagcaggagtaggactgatgagtaagagcttgatcaagtataaaggatatgtttctatgtagaatatgaat

SEQ ID NO: 231 - DNA, 200 bp, Amaranthus palmeri
attcatattctacatagaaacatatcctttatacttgatcaagctcttactcatcagtcctactcctgctgattttgctcacttcctctttgctacttttcaaatttagcaagagttgtgtggaggaaccataaaaagtatggcttgaattaggagaggaaaacgagtgactgaaattttgcgagaaggcaaccactacc

SEQ ID NO: 232 - DNA, 200 bp, Amaranthus palmeri
atatgtttctatgtagaatatgaatgcattacctgtagaattgacataatgatttgtctgcagtgttggcgaattttttgagcgacattttgggaaagaggtattgttgccaacttgccatgctctattccggtgaattaacaaatgttgcgcttctgcttactattgcttataattattgtttttttgcagtttgttga

SEQ ID NO: 233 - DNA, 200 bp, Amaranthus palmeri
tcaacaaactgcaaaaaaacaataattataagcaatagtaagcagaagcgcaacatttgttaattcaccggaatagagcatggcaagttggcaacaatacctctttcccaaaatgtcgctcaaaaaattcgccaacactgcagacaaatcattatgtcaattctacaggtaatgcattcatattctacatagaaacatat

SEQ ID NO: 234 - DNA, 200 bp, Amaranthus palmeri
ttattgtttttttgcagtttgttgattatgttattgacccttttgttgcgggtacatgtggtggagatcctcaatcgctatctgtaagttaaatactgtgccttctttttttttctcaaaattttctggaggttgtaaataaattatactccctcctattataatcaactgtcctatttccccttttggtatattcaaag

SEQ ID NO: 235 - DNA, 200 bp, Amaranthus palmeri
ctttgaatataccaaaaggggaaataggacagttgattataataggagggagtataatttatttacaacctccagaaaattttgagaaaaaaaaagaaggcacagtatttaacttacagatagcgattgaggatctccaccacatgtacccgcaacaaaagggtcaataacataatcaacaaactgcaaaaaaacaataa

SEQ ID NO: 236 - DNA, 200 bp, Amaranthus palmeri
atttccccttttggtatattcaaagtgagttaaatattgccatccattaaatttcactttgtcccttacttattttttcccttactcactcctctcatgtggtcccttaaactcggtgcattaccaaataggactattgattgaaataggagggagtatccgattgtgcttccaaaggtagttcaactcctcttcttttt

SEQ ID NO: 237 - DNA, 200 bp, Amaranthus palmeri
aaaaagaagaggagttgaactacctttggaagcacaatcggatactccctcctatttcaatcaatagtcctatttggtaatgcaccgagtttaagggaccacatgagaggagtgagtaagggaaaaaataagtaagggacaaagtgaaatttaatggatggcaatatttaactcactttgaatataccaaaaggggaaat

SEQ ID NO: 238 - DNA, 200 bp, Amaranthus palmeri
aggtagttcaactcctcttctttttctttaaatttttgtaccatactgtgcattttgaaccttaactcatttcgccatgaaggagtattatatttgagaagaacgcagatactattatcttatacattaggtttcattatcaatgattgtttgattgtcaactcctcttttccctttcatgctcatattgatgttatttc

SEQ ID NO: 239 - DNA, 200 bp, Amaranthus palmeri
gaaataacatcaatatgagcatgaaagggaaaagaggagttgacaatcaaacaatcattgataatgaaacctaatgtataagataatagtatctgcgttcttctcaaatataatactccttcatggcgaaatgagttaaggttcaaaatgcacagtatggtacaaaaatttaaagaaaaagaagaggagttgaactacct

SEQ ID NO: 240 - DNA, 200 bp, Amaranthus palmeri
ttcatgctcatattgatgttatttctatttggttatgaattttgtgtattgtgttaatgtcttactttattgtagatgcaccatacatttcccgacgtatggaatgttgaaaaaaggtatgaatcttaaagctttaattttcttcgaacgttatgtttcataattgattctttgggatcaatttccgtaagaacgataat

SEQ ID NO: 241 - DNA, 200 bp, Amaranthus palmeri
attatcgttcttacggaaattgatcccaaagaatcaattatgaaacataacgttcgaagaaaattaaagctttaagattcataccttttttcaacattccatacgtcgggaaatgtatggtgcatctacaataaagtaagacattaacacaatacacaaaattcataaccaaatagaaataacatcaatatgagcatgaa

SEQ ID NO: 242 - DNA, 200 bp, Amaranthus palmeri
gatcaatttccgtaagaacgataatttgaaaaaatttatgaaccttcaagctttcttcgaatttatatgctttgtaattcatgcttttagatgctgcaccattttatctatgtgtcttaagtttggtgtaatcatttgtatagcaaaagaatgaatggtctggtttgaaatggttcatagtgcaaaatgtgattgtgctt

SEQ ID NO: 243 - DNA, 200 bp, Amaranthus palmeri
aagcacaatcacattttgcactatgaaccatttcaaaccagaccattcattcttttgctatacaaatgattacaccaaacttaagacacatagataaaatggtgcagcatctaaaagcatgaattacaaagcatataaattcgaagaaagcttgaaggttcataaattttttcaaattatcgttcttacggaaattgatc

SEQ ID NO: 244 - DNA, 200 bp, Amaranthus palmeri
catagtgcaaaatgtgattgtgcttgcgattgaggtaacattcaaggtgatgcgattgtcgtactgtcaattgtcgtcctataccatgtgatatttgaataagcctaaaatgccatattgtacacctttaggatgtggacaaaatgggttcggtttcggtacatatgacaaatccttgcaatttgatctgtacgatacaa

SEQ ID NO: 245 - DNA, 200 bp, Amaranthus palmeri
ttgtatcgtacagatcaaattgcaaggatttgtcatatgtaccgaaaccgaacccattttgtccacatcctaaaggtgtacaatatggcattttaggcttattcaaatatcacatggtataggacgacaattgacagtacgacaatcgcatcaccttgaatgttacctcaatcgcaagcacaatcacattttgcactatg

SEQ ID NO: 246 - DNA, 200 bp, Amaranthus palmeri
ttgcaatttgatctgtacgatacaatgcgattttgtcttttgctttatgatggtgattccatatgcgattttagggcttagaaatttcccttgttcaagaacatctcaatcaatctttaaccaatttcaaccacattaaattgcgtcaaagtcgaactttataattcactcccaatctctgagatatccaaactccaaaa

SEQ ID NO: 247 - DNA, 200 bp, Amaranthus palmeri
ttttggagtttggatatctcagagattgggagtgaattataaagttcgactttgacgcaatttaatgtggttgaaattggttaaagattgattgagatgttcttgaacaagggaaatttctaagccctaaaatcgcatatggaatcaccatcataaagcaaaagacaaaatcgcattgtatcgtacagatcaaattgcaa

SEQ ID NO: 248 - DNA, 200 bp, Amaranthus palmeri
tctctgagatatccaaactccaaaagttctattggctttcatgttttcacaaagtaacgttggtgggactccttaccattttctttattatgcatttcgttgatgtataatagtatagattggtgctcttttcgctgtccttctaacatgcataacttcactagttcttatcgttttcttttcctccctatttttatttg

SEQ ID NO: 249 - DNA, 200 bp, Amaranthus palmeri
caaataaaaatagggaggaaaagaaaacgataagaactagtgaagttatgcatgttagaaggacagcgaaaagagcaccaatctatactattatacatcaacgaaatgcataataaagaaaatggtaaggagtcccaccaacgttactttgtgaaaacatgaaagccaatagaacttttggagtttggatatctcagaga

SEQ ID NO: 250 - DNA, 200 bp, Amaranthus palmeri
ttcttttcctccctatttttatttgacttgtagctatctatgttcactcttctcgcccaatccaatgttatcttctactccatgcttgcaaaagccacaaaatgctcactccaccaataagaggaaattgccagtccaccacttgctggaggcatccatggaagctgaagtatttttgtcctctactcataggatgcata

SEQ ID NO: 251 - DNA, 200 bp, Amaranthus palmeri
tatgcatcctatgagtagaggacaaaaatacttcagcttccatggatgcctccagcaagtggtggactggcaatttcctcttattggtggagtgagcattttgtggcttttgcaagcatggagtagaagataacattggattgggcgagaagagtgaacatagatagctacaagtcaaataaaaatagggaggaaaagaa

SEQ ID NO: 252 - DNA, 200 bp, Amaranthus palmeri
ttgtcctctactcataggatgcatacatgcatcgatttactttctaatactcctttaacttgattccgattagctctgctcttaacaggtgttgctagaaaacatcaactattttcagcataaattaaatgtgagcattacctaataacgtgaaaactatcaaatcttgtttgtagtgcaatattgcgttttcggttgcg

SEQ ID NO: 253 - DNA, 200 bp, Amaranthus palmeri
cgcaaccgaaaacgcaatattgcactacaaacaagatttgatagttttcacgttattaggtaatgctcacatttaatttatgctgaaaatagttgatgttttctagcaacacctgttaagagcagagctaatcggaatcaagttaaaggagtattagaaagtaaatcgatgcatgtatgcatcctatgagtagaggacaa

SEQ ID NO: 254 - DNA, 200 bp, Amaranthus palmeri
attattgtgtaattcttccctcacgtctctattgtcttcatttttttagaaaaataaataaagcttggttttatagattttgtaactgatatgcaatacatttgcgtttgctttcagttattgattcaaaaacaataatgctaaagccctaatcctaacatgttgtgtcatctgttgaaacaatacttgaaatcgctata

SEQ ID NO: 255 - DNA, 200 bp, Amaranthus palmeri
tatagcgatttcaagtattgtttcaacagatgacacaacatgttaggattagggctttagcattattgtttttgaatcaataactgaaagcaaacgcaaatgtattgcatatcagttacaaaatctataaaaccaagctttatttatttttctaaaaaaatgaagacaatagagacgtgagggaagaattacacaataat

SEQ ID NO: 256 - DNA, 200 bp, Amaranthus palmeri
tgaaacaatacttgaaatcgctataaaaagggatttttgtcgggtacttcagttgttgaaattgatatggtcaagtacaattcattttaacccaatttgtaatgatttactggcttggtttcttagctgtttgttttaataaaggattttagttcggtatttggttgttgaaaaaattgatatggccaagtaatggtcat

SEQ ID NO: 257 - DNA, 200 bp, Amaranthus palmeri
atgaccattacttggccatatcaattttttcaacaaccaaataccgaactaaaatcctttattaaaacaaacagctaagaaaccaagccagtaaatcattacaaattgggttaaaatgaattgtacttgaccatatcaatttcaacaactgaagtacccgacaaaaatccctttttatagcgatttcaagtattgtttca

SEQ ID NO: 258 - DNA, 200 bp, Amaranthus palmeri
attgatatggccaagtaatggtcatattaacacaattggtaatgttttattagctcaatagtgtttgttaagtatgtgactcaaatttaatcaagtataacttattgaagcgtagttcttttatccattaggtttggctctgtgtttgctggactaattcaatcaacattgttatctaagaaggaaaagggtggaggaga

SEQ ID NO: 259 - DNA, 200 bp, Amaranthus palmeri
tctcctccacccttttccttcttagataacaatgttgattgaattagtccagcaaacacagagccaaacctaatggataaaagaactacgcttcaataagttatacttgattaaatttgagtcacatacttaacaaacactattgagctaataaaacattaccaattgtgttaatatgaccattacttggccatatcaat

SEQ ID NO: 260 - DNA, 200 bp, Amaranthus palmeri
ctaagaaggaaaagggtggaggagaaaatgcttctatcaagaagcctcgtgtacgcggttcattttcattccatggtggaatgcaggtataaccttatagccataatttcgctttttataccttatacttccaaaatatattgatgcattttcttgctacaatcacaaaagctttgggaaaaattctcaattttgtcaaa

SEQ ID NO: 261 - DNA, 200 bp, Amaranthus palmeri
tttgacaaaattgagaatttttcccaaagcttttgtgattgtagcaagaaaatgcatcaatatattttggaagtataaggtataaaaagcgaaattatggctataaggttatacctgcattccaccatggaatgaaaatgaaccgcgtacacgaggcttcttgatagaagcattttctcctccacccttttccttcttag

SEQ ID NO: 262 - DNA, 200 bp, Amaranthus palmeri
gggaaaaattctcaattttgtcaaatctactaaaataattcattttggaaccaaggttttctatttcagaatacatggatgaagacatgcagtaagtatggataaaataatctagatgtaaaaggtttttagtctattaagcaagaatattataattcagagtcgtttcatcaataaagtgttgtttaagtgcagcaatt

SEQ ID NO: 263 - DNA, 200 bp, Amaranthus palmeri
aattgctgcacttaaacaacactttattgatgaaacgactctgaattataatattcttgcttaatagactaaaaaccttttacatctagattattttatccatacttactgcatgtcttcatccatgtattctgaaatagaaaaccttggttccaaaatgaattattttagtagatttgacaaaattgagaatttttccc

SEQ ID NO: 264 - DNA, 200 bp, Amaranthus palmeri
aaagtgttgtttaagtgcagcaattacattctgcttcaagcaaaggctatcttaagacttaagaggctcccaaaacatgaggaggtatgagaccttagaggccaaagaaataaaatttgatgaggagacttggtgagataccttgcttccaaaaatgatatatttttccccttagacacctcagattatgacatttataa

SEQ ID NO: 265 - DNA, 200 bp, Amaranthus palmeri
ttataaatgtcataatctgaggtgtctaaggggaaaaatatatcatttttggaagcaaggtatctcaccaagtctcctcatcaaattttatttctttggcctctaaggtctcatacctcctcatgttttgggagcctcttaagtcttaagatagcctttgcttgaagcagaatgtaattgctgcacttaaacaacacttt

SEQ ID NO: 266 - DNA, 200 bp, Amaranthus palmeri
acacctcagattatgacatttataaggtgtccctgcgtattcgacgagattttacgacctatactctaaagtctaaattgagtgagaaatgtgtatatgtgtaagaaaggaaagttagtaccatgaattccatgtctacgacctcaaagtgttcataccattgaaattagtgagcttacaattgttaagaaagcatcaac

SEQ ID NO: 267 - DNA, 200 bp, Amaranthus palmeri
gttgatgctttcttaacaattgtaagctcactaatttcaatggtatgaacactttgaggtcgtagacatggaattcatggtactaactttcctttcttacacatatacacatttctcactcaatttagactttagagtataggtcgtaaaatctcgtcgaatacgcagggacaccttataaatgtcataatctgaggtgt

SEQ ID NO: 268 - DNA, 200 bp, Amaranthus palmeri
ttacaattgttaagaaagcatcaactattcataattgatcattgatgaagtgtgtaatagacatgctaggtgaaattcgaaagggatctactctgtctttgagtttacaatttgcttctagtttttagctatttataggtgctatcaaagggttgaatattgttttttctgaacattgttgccgagttgtgaagggagaa

SEQ ID NO: 269 - DNA, 200 bp, Amaranthus palmeri
ttctcccttcacaactcggcaacaatgttcagaaaaaacaatattcaaccctttgatagcacctataaatagctaaaaactagaagcaaattgtaaactcaaagacagagtagatccctttcgaatttcacctagcatgtctattacacacttcatcaatgatcaattatgaatagttgatgctttcttaacaattgtaa

SEQ ID NO: 270 - DNA, 200 bp, Amaranthus palmeri
ttgttgccgagttgtgaagggagaatgatggtagatttctcttaatgagaacattctcttcataaagagttcgatagcgcaaaaacgaaagcttattgccaaaagtggctggggtagatgaaagagaactgcaattgattttgctaggcttgactttgagtaaagaattcatggcataaggtagaaaaataggagatggc

SEQ ID NO: 271 - DNA, 200 bp, Amaranthus palmeri
gccatctcctatttttctaccttatgccatgaattctttactcaaagtcaagcctagcaaaatcaattgcagttctctttcatctaccccagccacttttggcaataagctttcgtttttgcgctatcgaactctttatgaagagaatgttctcattaagagaaatctaccatcattctcccttcacaactcggcaacaa

SEQ ID NO: 272 - DNA, 200 bp, Amaranthus palmeri
ataaggtagaaaaataggagatggctgaatgatatcgaaaccttttgattctttttgttttgtttgcaatgcacagaaaggcaggacgggaaagtgtgattaaatggatgggaaaaattgctagaatagaaaagaagaaagatgtagcactcacgtgaggaaattacccaatatctgaatggagctcacactcctctctt

SEQ ID NO: 273 - DNA, 200 bp, Amaranthus palmeri
aagagaggagtgtgagctccattcagatattgggtaatttcctcacgtgagtgctacatctttcttcttttctattctagcaatttttcccatccatttaatcacactttcccgtcctgcctttctgtgcattgcaaacaaaacaaaaagaatcaaaaggtttcgatatcattcagccatctcctatttttctaccttat

SEQ ID NO: 274 - DNA, 200 bp, Amaranthus palmeri
tgaatggagctcacactcctctcttcctctactaatatacaacctgcctaatttgcacaatagctgctaatatcatagtagtatgagataatggctggatgtctcaattgttaccctagttttgacaactattttacgttggcatttcggtggcctggggccgtggactgagtcaccttaaaaattcatctgtgatatag

SEQ ID NO: 275 - DNA, 200 bp, Amaranthus palmeri
ctatatcacagatgaatttttaaggtgactcagtccacggccccaggccaccgaaatgccaacgtaaaatagttgtcaaaactagggtaacaattgagacatccagccattatctcatactactatgatattagcagctattgtgcaaattaggcaggttgtatattagtagaggaagagaggagtgtgagctccattca

SEQ ID NO: 276 - DNA, 200 bp, Amaranthus palmeri
ccttaaaaattcatctgtgatatagtttagaatcaattttgaaaatttaggcaggcctaaattttgataaagatagcatgatctaaagaatgcagctctaataaatttacataaaatttgatattaagtagtctctgtctaggcctgccttccgagcttgtatattaactgagcgcatgtttatttgaggaatagcatag

SEQ ID NO: 277 - DNA, 200 bp, Amaranthus palmeri
ctatgctattcctcaaataaacatgcgctcagttaatatacaagctcggaaggcaggcctagacagagactacttaatatcaaattttatgtaaatttattagagctgcattctttagatcatgctatctttatcaaaatttaggcctgcctaaattttcaaaattgattctaaactatatcacagatgaatttttaagg

SEQ ID NO: 278 - DNA, 200 bp, Amaranthus palmeri
catgtttatttgaggaatagcataggagtcatttttttgcatactaattagcatgtcaattttattccatttgctgagtactgtatgttctgcagacacttgttgacacaatgtgcaaacagcttggtgaagacgaactcaaactccagtgtgaggtgctgtccttgtcatacaaccagaaggggatcccttcattaggg

SEQ ID NO: 279 - DNA, 200 bp, Amaranthus palmeri
ccctaatgaagggatccccttctggttgtatgacaaggacagcacctcacactggagtttgagttcgtcttcaccaagctgtttgcacattgtgtcaacaagtgtctgcagaacatacagtactcagcaaatggaataaaattgacatgctaattagtatgcaaaaaaatgactcctatgctattcctcaaataaacatg

SEQ ID NO: 280 - DNA, 200 bp, Amaranthus palmeri
catgtggtggagatcctcaatcgctatctatgcaccatacatttcccgacgtatggaatgttgaaaaaaggtttggctctgtgtttgctggactaattcaatcaacattgttatctaagaaggaaaagggtggagggaaaatgcttctatcaagaagcctcgtgtacgcggttcattttcattccatggtggaatgcaga

SEQ ID NO: 281 - DNA, 200 bp, Amaranthus palmeri
tctgcattccaccatggaatgaaaatgaaccgcgtacacgaggcttcttgatagaagcattttccctccacccttttccttcttagataacaatgttgattgaattagtccagcaaacacagagccaaaccttttttcaacattccatacgtcgggaaatgtatggtgcatagatagcgattgaggatctccaccacatg

SEQ ID NO: 282 - DNA, 200 bp, Amaranthus palmeri
ttttcattccatggtggaatgcagacacttgttgacacaatgtgcaaacagcttggtgaagatgaactcaagctccagtgtgaggtgctgtccttgtcatacaaccagaaggggatcccttcattagggaattggtcagtctcttctatgtcaaataataccagtgaagatcaatcttatgatgctgtggttgtcactgc

SEQ ID NO: 283 - DNA, 200 bp, Amaranthus palmeri
gcagtgacaaccacagcatcataagattgatcttcactggtattatttgacatagaagagactgaccaattccctaatgaagggatccccttctggttgtatgacaaggacagcacctcacactggagcttgagttcatcttcaccaagctgtttgcacattgtgtcaacaagtgtctgcattccaccatggaatgaaaa

SEQ ID NO: 284 - DNA, 200 bp, Amaranthus palmeri
cttatgatgctgtggttgtcactgctccaattcgcaatgtcaaagaaatgaagattatgaaatttggaaatccattttcacttgactttattccagaggtgacttacgtacccctttccgttatgattactgcattcaagaaggataaagtgaagagacctctcgagggcttcggagttcttatcccgtctaaagagcaa

SEQ ID NO: 285 - DNA, 200 bp, Amaranthus palmeri
ttgctctttagacgggataagaactccgaagccctcgagaggtctcttcactttatccttcttgaatgcagtaatcataacggaaaggggtacgtaagtcacctctggaataaagtcaagtgaaaatggatttccaaatttcataatcttcatttctttgacattgcgaattggagcagtgacaaccacagcatcataag

SEQ ID NO: 286 - DNA, 200 bp, Amaranthus palmeri
agttcttatcccgtctaaagagcaacataatggactgaagactcttggtactttattttcgtctatgatgtttcctgatcgtgctccatctgatatgtgtctttttaccacatttgtcggaggaagcagaaatagaaaacttgcaaacgcttcaacggatgaattgaagcaaatagtttcttctgaccttcagcagctgt

SEQ ID NO: 287 - DNA, 200 bp, Amaranthus palmeri
acagctgctgaaggtcagaagaaactatttgcttcaattcatccgttgaagcgtttgcaagttttctatttctgcttcctccgacaaatgtggtaaaaagacacatatcagatggagcacgatcaggaaacatcatagacgaaaataaagtaccaagagtcttcagtccattatgttgctctttagacgggataagaact

SEQ ID NO: 288 - DNA, 200 bp, Amaranthus palmeri
gtttcttctgaccttcagcagctgttgggcactgaggacgaaccttcatttgtcaatcatctcttttggagcaatgcattcccgttgtatgggcacaattacgattctgttttgacagcaatagacaagatggaaaaggatcttcctggattttttatgcaggtaaccataagggtggactttcagtaggaaaagcgatg

SEQ ID NO: 289 - DNA, 200 bp, Amaranthus palmeri
catcgcttttcctactgaaagtccacccttatggttacctgcataaaaaatccaggaagatccttttccatcttgtctattgctgtcaaaacagaatcgtaattgtgcccatacaacgggaatgcattgctccaaaagagatgattgacaaatgaaggttcgtcctcagtgcccaacagctgctgaaggtcagaagaaac

SEQ ID NO: 290 - DNA, 200 bp, Amaranthus palmeri
ggggagcgggttgctggataaccagagagagtgcaagagagatgagtgccatggcgttatcgagcagcattctacaatgtccgccgcactccgacatctctttccgcttttctgcttatacaccaacccgctcccccatcttcttcggaagacctcgaaaattatcatatatccattgttccacaagctcaagctcaact

SEQ ID NO: 291 - DNA, 200 bp, Amaranthus palmeri
agttgagcttgagcttgtggaacaatggatatatgataattttcgaggtcttccgaagaagatgggggagcgggttggtgtataagcagaaaagcggaaagagatgtcggagtgcggcggacattgtagaatgctgctcgataacgccatggcactcatctctcttgcactctctctggttatccagcaacccgctcccc

SEQ ID NO: 292 - DNA, 200 bp, Amaranthus palmeri
ggtgtttatttgggcatggccttatgtgtgatgttggtaaattttgtggcttcgtccactaatctgatgtatcggatctgttaaagggagccctctcatcctatgcttatcaatgactttttcatatgcctatcaaacagatcagattggatcgggttcgagttcaggtcatatataaacatgtcagcaaacccttgacc

SEQ ID NO: 293 - DNA, 200 bp, Amaranthus palmeri
ggtcaagggtttgctgacatgtttatatatgacctgaactcgaacccgatccaatctgatctgtttgataggcatatgaaaaagtcattgataagcataggatgagagggctccctttaacagatccgatacatcagattagtggacgaagccacaaaatttaccaacatcacacataaggccatgcccaaataaacacc

SEQ ID NO: 294 - DNA, 200 bp, Amaranthus palmeri
taaacatgtcagcaaacccttgacccatacccaacccatttagttaattggcttgaaaatcacaaccttaattcgaccagcgacagatcaggttgacctgatttcgacccacttaacccatttataatttttttttcgatttaagttttttaacattgattaaatctaattttttaggctttaattttaattttatgttt

SEQ ID NO: 295 - DNA, 200 bp, Amaranthus palmeri
aaacataaaattaaaattaaagcctaaaaaattagatttaatcaatgttaaaaaacttaaatcgaaaaaaaaattataaatgggttaagtgggtcgaaatcaggtcaacctgatctgtcgctggtcgaattaaggttgtgattttcaagccaattaactaaatgggttgggtatgggtcaagggtttgctgacatgttta

SEQ ID NO: 296 - DNA, 200 bp, Amaranthus palmeri
aggctttaattttaattttatgtttttttgtttaatttgtatttactatgaaaaataagaaactattatatgaactgagtttagcttacacttattaatttaactcgaaattaacacatttaattaaatggttatatagggttttttagttttaaaatttcaacctgaacctaatctatttaataaaaagatcagatctg

SEQ ID NO: 297 - DNA, 200 bp, Amaranthus palmeri
cagatctgatctttttattaaatagattaggttcaggttgaaattttaaaactaaaaaaccctatataaccatttaattaaatgtgttaatttcgagttaaattaataagtgtaagctaaactcagttcatataatagtttcttatttttcatagtaaatacaaattaaacaaaaaaacataaaattaaaattaaagcct

SEQ ID NO: 298 - DNA, 200 bp, Amaranthus palmeri
ctatttaataaaaagatcagatctgatcaacccatataattaattgggtcaaaatctcaactcaaacccatttatttcgaattaaattcagatcaaattagcaggtcggatcaactagcgctaatttttcctctcaagttttttcatatgatgccccttgttttctttgaataaaattcaccaatttaaaatccctgccc

SEQ ID NO: 299 - DNA, 200 bp, Amaranthus palmeri
gggcagggattttaaattggtgaattttattcaaagaaaacaaggggcatcatatgaaaaaacttgagaggaaaaattagcgctagttgatccgacctgctaatttgatctgaatttaattcgaaataaatgggtttgagttgagattttgacccaattaattatatgggttgatcagatctgatctttttattaaatag

SEQ ID NO: 300 - DNA, 200 bp, Amaranthus palmeri
attcaccaatttaaaatccctgcccttgatccgttggtattggtatttggtaaagcacatatggtaaattctactccattgttatctgtagttttggttctaaaccccaaacaaatcctactcctagcaccactaatcctcattactttctgtttgctgtctttctctacattcctactaaattaagacctagatgcagt

SEQ ID NO: 301 - DNA, 200 bp, Amaranthus palmeri
actgcatctaggtcttaatttagtaggaatgtagagaaagacagcaaacagaaagtaatgaggattagtggtgctaggagtaggatttgtttggggtttagaaccaaaactacagataacaatggagtagaatttaccatatgtgctttaccaaataccaataccaacggatcaagggcagggattttaaattggtgaat

SEQ ID NO: 302 - DNA, 200 bp, Amaranthus palmeri
tactaaattaagacctagatgcagtgttattctgttcgaggttgccgaaaacggtacaatagttgcctaatttgcaattcatgtttgttcttgcgttttctacattgtttactctattggaacaaaggttgaactttcagcctttcagggagtattttgatttttctgtcaaattaccttgccagatttatttggctatt

SEQ ID NO: 303 - DNA, 200 bp, Amaranthus palmeri
aatagccaaataaatctggcaaggtaatttgacagaaaaatcaaaatactccctgaaaggctgaaagttcaacctttgttccaatagagtaaacaatgtagaaaacgcaagaacaaacatgaattgcaaattaggcaactattgtaccgttttcggcaacctcgaacagaataacactgcatctaggtcttaatttagta

SEQ ID NO: 304 - DNA, 200 bp, Amaranthus palmeri
accttgccagatttatttggctattttgattgtgtgtatttctttgtcccttgtttccatggggctaaactccttttggttaatcttaaacatttcttctaattttgaattgcagtggtatgaagtgttgtttaatatacaatcaatttttctgaactgggttaatgaagagaagcattgtagacatgaggaatgtgttc

SEQ ID NO: 305 - DNA, 200 bp, Amaranthus palmeri
gaacacattcctcatgtctacaatgcttctcttcattaacccagttcagaaaaattgattgtatattaaacaacacttcataccactgcaattcaaaattagaagaaatgtttaagattaaccaaaaggagtttagccccatggaaacaagggacaaagaaatacacacaatcaaaatagccaaataaatctggcaaggt

SEQ ID NO: 306 - DNA, 200 bp, Amaranthus palmeri
cattgtagacatgaggaatgtgttcaagcatctcaaaacaaccaaattaatcccaaatgggatcttcaactgtaatagaggtaaatcacatatattctcatttaatggttattgttttattttaaggatgttattatgttgttatcaatgatagaaataagagaagcttgagcattcaaatgtatctatcactcactggt

SEQ ID NO: 307 - DNA, 200 bp, Amaranthus palmeri
accagtgagtgatagatacatttgaatgctcaagcttctcttatttctatcattgataacaacataataacatccttaaaataaaacaataaccattaaatgagaatatatgtgatttacctctattacagttgaagatcccatttgggattaatttggttgttttgagatgcttgaacacattcctcatgtctacaatg

SEQ ID NO: 308 - DNA, 200 bp, Amaranthus palmeri
tcaaatgtatctatcactcactggttgtggacatctaaaatatggaccaagagttttcttcatttcttgtaccagaatttgcaaatgtatgattaaagtttaggttggagttgcaataaaatttcattaccccgacgctattaagtggctcacactgaggcggggtttgagggtcggatggtgcaaccttcaggagaggt

SEQ ID NO: 309 - DNA, 200 bp, Amaranthus palmeri
acctctcctgaaggttgcaccatccgaccctcaaaccccgcctcagtgtgagccacttaatagcgtcggggtaatgaaattttattgcaactccaacctaaactttaatcatacatttgcaaattctggtacaagaaatgaagaaaactcttggtccatattttagatgtccacaaccagtgagtgatagatacatttga

SEQ ID NO: 310 - DNA, 200 bp, Amaranthus palmeri
ggatggtgcaaccttcaggagaggttctaagcattttcaacatgttcaaccgcagagggtcccgtaaaattggaggcttcaatattaaattatgtagtatgtgttaagtgtttaaagatataaaaatgttaatgaatacataatttttaaaattgcacagggctttcaaagaaatttttgattttgctccgcccatggca

SEQ ID NO: 311 - DNA, 200 bp, Amaranthus palmeri
tgccatgggcggagcaaaatcaaaaatttctttgaaagccctgtgcaattttaaaaattatgtattcattaacatttttatatctttaaacacttaacacatactacataatttaatattgaagcctccaattttacgggaccctctgcggttgaacatgttgaaaatgcttagaacctctcctgaaggttgcaccatcc

SEQ ID NO: 312 - DNA, 200 bp, Amaranthus palmeri
ttttgattttgctccgcccatggcaacctttggcaaatctggatagaattagagaaatttacttttatgtatgtataatctgatgaatgaatgaatgaacaatgaagttcatttctgagtcaatgacctatatactatcgaggtttcgttaaataggatatataaataaaattagagacatcttttatccctaatgttgt

SEQ ID NO: 313 - DNA, 200 bp, Amaranthus palmeri
acaacattagggataaaagatgtctctaattttatttatatatcctatttaacgaaacctcgatagtatataggtcattgactcagaaatgaacttcattgttcattcattcattcatcagattatacatacataaaagtaaatttctctaattctatccagatttgccaaaggttgccatgggcggagcaaaatcaaaa

SEQ ID NO: 314 - DNA, 200 bp, Amaranthus palmeri
agacatcttttatccctaatgttgtctgttttcttttctgggcgagactgtttttggagaaaaacgttatgttgaatgcttgatttactcagaactgatgcaaacagatggataaaaaatggtgttttcctagtgtttatgtttcataaaaggatttcaaattccaatcgtatgaagtttgaaatactgctttttgtttt

SEQ ID NO: 315 - DNA, 200 bp, Amaranthus palmeri
aaaacaaaaagcagtatttcaaacttcatacgattggaatttgaaatccttttatgaaacataaacactaggaaaacaccattttttatccatctgtttgcatcagttctgagtaaatcaagcattcaacataacgtttttctccaaaaacagtctcgcccagaaaagaaaacagacaacattagggataaaagatgtct

SEQ ID NO: 316 - DNA, 200 bp, Amaranthus palmeri
agtttgaaatactgctttttgtttttgtagcttcgtgttttgctttccttcactcttcaccagggaacgttgttgaagtttgttccaagaagcaagaagtcgtaattgcaatcgggagcaatgttggtgacagattagaaaatttcaaccaagctctgcaacaaatgaagaaattaggcatagacatcacaaggcatggt

SEQ ID NO: 317 - DNA, 200 bp, Amaranthus palmeri
accatgccttgtgatgtctatgcctaatttcttcatttgttgcagagcttggttgaaattttctaatctgtcaccaacattgctcccgattgcaattacgacttcttgcttcttggaacaaacttcaacaacgttccctggtgaagagtgaaggaaagcaaaacacgaagctacaaaaacaaaaagcagtatttcaaact

SEQ ID NO: 318 - DNA, 200 bp, Amaranthus palmeri
aggcatagacatcacaaggcatggttgtttatatgagacggaacctgcatacgtgactgatcaaccgaagtttcttaactctgctttaagaggctttacaagacttggacctcatgaattattaggggtattgaagaaaattgagaaggatatgggtagaaccaagggaataaggtatggtcctaggccaattgacttgg

SEQ ID NO: 319 - DNA, 200 bp, Amaranthus palmeri
ccaagtcaattggcctaggaccataccttattcccttggttctacccatatccttctcaattttcttcaatacccctaataattcatgaggtccaagtcttgtaaagcctcttaaagcagagttaagaaacttcggttgatcagtcacgtatgcaggttccgtctcatataaacaaccatgccttgtgatgtctatgcct

SEQ ID NO: 320 - DNA, 200 bp, Amaranthus palmeri
tatggtcctaggccaattgacttggacatactattttatgggaagtttagggtgagctctgagagcctcactatcccccatgaaaggatatgggaaagaccatttgtgatggcaccattgattgattgtattgggtctgatgtagaaaatgacactatttgtacgtggcattcattatcaaatttttcgggtggaatctt

SEQ ID NO: 321 - DNA, 200 bp, Amaranthus palmeri
aagattccacccgaaaaatttgataatgaatgccacgtacaaatagtgtcattttctacatcagacccaatacaatcaatcaatggtgccatcacaaatggtctttcccatatcctttcatgggggatagtgaggctctcagagctcaccctaaacttcccataaaatagtatgtccaagtcaattggcctaggaccata

SEQ ID NO: 322 - DNA, 200 bp, Amaranthus palmeri
tatcaaatttttcgggtggaatctttgaagcatggggtaaactcggtggaagctccctaatcgggaaggatggaatgaaaagggttttgcccgttggaaatctcttatgggattggtctcataaaacctctgttatgggagtcttgaacttgactcctgatagctttagtgatggcggaagttttcaatctgtcaatact

SEQ ID NO: 323 - DNA, 200 bp, Amaranthus palmeri
agtattgacagattgaaaacttccgccatcactaaagctatcaggagtcaagttcaagactcccataacagaggttttatgagaccaatcccataagagatttccaacgggcaaaacccttttcattccatccttcccgattagggagcttccaccgagtttaccccatgcttcaaagattccacccgaaaaatttgata

SEQ ID NO: 324 - DNA, 200 bp, Amaranthus palmeri
cggaagttttcaatctgtcaatactgcggttgctaaggttcgtcagatgatctcagatggggcagatataattgacatcggggcacaatcaaccagacccatggcaactagaatttcggctgaagaagagctagcaagagtagtacctgtattagaagctgtcaaggatttgatcgaggaagaaggaagaatcttgtcag

SEQ ID NO: 325 - DNA, 200 bp, Amaranthus palmeri
ctgacaagattcttccttcttcctcgatcaaatccttgacagcttctaatacaggtactactcttgctagctcttcttcagccgaaattctagttgccatgggtctggttgattgtgccccgatgtcaattatatctgccccatctgagatcatctgacgaaccttagcaaccgcagtattgacagattgaaaacttccg

SEQ ID NO: 326 - DNA, 200 bp, Amaranthus palmeri
gaggaagaaggaagaatcttgtcagtggatacgttttattctaaagttgctttggaggccgtcaagaagggggcacacattgtgaatgatgtctctagtggtaaactcgattccgagatgtttaatgttgttgcggaccttaaagttccttatatagcaatgcacatgcgaggagatccgacttcaatgcaaaactctga

SEQ ID NO: 327 - DNA, 200 bp, Amaranthus palmeri
tcagagttttgcattgaagtcggatctcctcgcatgtgcattgctatataaggaactttaaggtccgcaacaacattaaacatctcggaatcgagtttaccactagagacatcattcacaatgtgtgcccccttcttgacggcctccaaagcaactttagaataaaacgtatccactgacaagattcttccttcttcctc

SEQ ID NO: 328 - DNA, 200 bp, Amaranthus palmeri
atccgacttcaatgcaaaactctgagaacttgacctacaatgatgtttgtaagcaagtggcttcggagttgagttctagggtcatagatgcagaattatcgggaattcctgcttggaggatagttattgatcccggcatcggattttctaagaatacgaatcaaaatttggaaattcttagtggtttacaaaagatacgg

SEQ ID NO: 329 - DNA, 200 bp, Amaranthus palmeri
ccgtatcttttgtaaaccactaagaatttccaaattttgattcgtattcttagaaaatccgatgccgggatcaataactatcctccaagcaggaattcccgataattctgcatctatgaccctagaactcaactccgaagccacttgcttacaaacatcattgtaggtcaagttctcagagttttgcattgaagtcggat

SEQ ID NO: 330 - DNA, 200 bp, Amaranthus palmeri
tcttagtggtttacaaaagatacgggaagagatagctaagaagagtttggcggtggctcattgccccttgctaattggaccttcaagaaagaggtttctgggcgagatttgtgagcgccctgtagcagctgacagggatcctgctaccattgcttctataactgctggagttttaggtggtgcaaacattgtaagagtac

SEQ ID NO: 331 - DNA, 200 bp, Amaranthus palmeri
gtactcttacaatgtttgcaccacctaaaactccagcagttatagaagcaatggtagcaggatccctgtcagctgctacagggcgctcacaaatctcgcccagaaacctctttcttgaaggtccaattagcaaggggcaatgagccaccgccaaactcttcttagctatctcttcccgtatcttttgtaaaccactaaga

SEQ ID NO: 332 - DNA, 200 bp, Amaranthus palmeri
ggtggtgcaaacattgtaagagtacataatgttagggataaccttgatgctgtcaagttatgtgatgccatactcggaaaaactgattaactgcttgtttgtaccaccttgtgaatgatgtctagtggaaggttcgattgggattatgatgaagtccgttagtttgctcgaaagaagagctttagcccgtaaggttatag

SEQ ID NO: 333 - DNA, 200 bp, Amaranthus palmeri
ctataaccttacgggctaaagctcttctttcgagcaaactaacggacttcatcataatcccaatcgaaccttccactagacatcattcacaaggtggtacaaacaagcagttaatcagtttttccgagtatggcatcacataacttgacagcatcaaggttatccctaacattatgtactcttacaatgtttgcaccacc

SEQ ID NO: 334 - DNA, 200 bp, Amaranthus palmeri
agagctttagcccgtaaggttatagttcttacagatgtagaatcattggctatttgcctatttctgcttagaagatcatagcattgatccagactttggattccatgtagaattatgttgcgactcatggtcgaattggccctttgaggaattgttgaagttccttgagtctatggttcaatcggctcggttcgatgaag

SEQ ID NO: 335 - DNA, 200 bp, Amaranthus palmeri
cttcatcgaaccgagccgattgaaccatagactcaaggaacttcaacaattcctcaaagggccaattcgaccatgagtcgcaacataattctacatggaatccaaagtctggatcaatgctatgatcttctaagcagaaataggcaaatagccaatgattctacatctgtaagaactataaccttacgggctaaagctct

SEQ ID NO: 336 - DNA, 200 bp, Amaranthus palmeri
gttcaatcggctcggttcgatgaaggttggactgtgtcgagacaagatgggtcaaagagaccaatggacaagaagtcgaccttgggcaagcttgatcaagttacttggacgagcagataacagcaggctctggcgagcattagacatacatatcatttgttttttgaagtcagatctgcaatcaatcagttgcaatggac

SEQ ID NO: 337 - DNA, 200 bp, Amaranthus palmeri
gtccattgcaactgattgattgcagatctgacttcaaaaaacaaatgatatgtatgtctaatgctcgccagagcctgctgttatctgctcgtccaagtaacttgatcaagcttgcccaaggtcgacttcttgtccattggtctctttgacccatcttgtctcgacacagtccaaccttcatcgaaccgagccgattgaac

SEQ ID NO: 338 - DNA, 200 bp, Amaranthus palmeri
ctgcaatcaatcagttgcaatggacagaccatatacggttgttagttgttcctgtcactctttgagttgaattagatcatgcaaacactgtaagagtcttgattttgtgaagctatgtgatactgtacttctcaaaatgaaatctttgatatgatgttagcttcaagagttgtttttccccccctcacattctgttctat

SEQ ID NO: 339 - DNA, 200 bp, Amaranthus palmeri
atagaacagaatgtgagggggggaaaaacaactcttgaagctaacatcatatcaaagatttcattttgagaagtacagtatcacatagcttcacaaaatcaagactcttacagtgtttgcatgatctaattcaactcaaagagtgacaggaacaactaacaaccgtatatggtctgtccattgcaactgattgattgcag

SEQ ID NO: 340 - DNA, 200 bp, Amaranthus palmeri
ttccccccctcacattctgttctatgttgtattgttgtgtgctttttggaattgtattcctgtaattagaattattcctgcaaaatggtattcctttatatcatcaaaggagtttttgtacttctaatcattgatctttagatgcaaaactgaattaatacaagtgttcttgatgaaggcttattgaagaactcactttt

SEQ ID NO: 341 - DNA, 200 bp, Amaranthus palmeri
aaaagtgagttcttcaataagccttcatcaagaacacttgtattaattcagttttgcatctaaagatcaatgattagaagtacaaaaactcctttgatgatataaaggaataccattttgcaggaataattctaattacaggaatacaattccaaaaagcacacaacaatacaacatagaacagaatgtgagggggggaa

SEQ ID NO: 342 - DNA, 200 bp, Amaranthus palmeri
aaggcttattgaagaactcactttttatttatgtctaaacttgttaaagatgttctgcttccgcccttgccacgggatgtcgggattgactaagggtggtaatcgagggattcctatgcttgaattgactcgtttaagattttgcgttgattttaagtcaaatgttttgctaagcataaactattctagctcgacttgaa

SEQ ID NO: 343 - DNA, 200 bp, Amaranthus palmeri
ttcaagtcgagctagaatagtttatgcttagcaaaacatttgacttaaaatcaacgcaaaatcttaaacgagtcaattcaagcataggaatccctcgattaccacccttagtcaatcccgacatcccgtggcaagggcggaagcagaacatctttaacaagtttagacataaataaaaagtgagttcttcaataagcctt

SEQ ID NO: 344 - DNA, 200 bp, Amaranthus palmeri
ataaactattctagctcgacttgaataatgaagttttcgagtcaagtccgagctgttctgtaagtttatgtatcttgaagcttcttagttcttacttcttatccttatttgtttgacacattgaaccgcgttgatgcttgcttgactcaacccgttaaagtcttgaattcatcacgaattcgagtcgagcaagtttaaac

SEQ ID NO: 345 - DNA, 200 bp, Amaranthus palmeri
gtttaaacttgctcgactcgaattcgtgatgaattcaagactttaacgggttgagtcaagcaagcatcaacgcggttcaatgtgtcaaacaaataaggataagaagtaagaactaagaagcttcaagatacataaacttacagaacagctcggacttgactcgaaaacttcattattcaagtcgagctagaatagtttat

SEQ ID NO: 346 - DNA, 200 bp, Amaranthus palmeri
gaattcgagtcgagcaagtttaaacccaacattaactaagctctcgaggcttaatgaggcaggggtagctcaagtttgttattcaagcaacttaccatagtattcttttaaaaggcatatagtcagttagttatttgttaatttcagtagaacgaaagaagtacattattaaacttggccattgatgcttgagctagaga

SEQ ID NO: 347 - DNA, 200 bp, Amaranthus palmeri
tctctagctcaagcatcaatggccaagtttaataatgtacttctttcgttctactgaaattaacaaataactaactgactatatgccttttaaaagaatactatggtaagttgcttgaataacaaacttgagctacccctgcctcattaagcctcgagagcttagttaatgttgggtttaaacttgctcgactcgaattc

SEQ ID NO: 348 - DNA, 200 bp, Amaranthus palmeri
tggccattgatgcttgagctagagagcttcggttgtgatcgaaacgaatcctgatttcgctcttgatctttgatgtgaagtgacaaggccttcataaaactcctttattcttcagcagtgcatacaaaaatcatgtgtgcccagctcctagctcacataccgcgtttttcccctaatctagtgtggtcaaataaaaacag

SEQ ID NO: 349 - DNA, 200 bp, Amaranthus palmeri
ctgtttttatttgaccacactagattaggggaaaaacgcggtatgtgagctaggagctgggcacacatgatttttgtatgcactgctgaagaataaaggagttttatgaaggccttgtcacttcacatcaaagatcaagagcgaaatcaggattcgtttcgatcacaaccgaagctctctagctcaagcatcaatggcca

SEQ ID NO: 350 - DNA, 200 bp, Amaranthus palmeri
atctagtgtggtcaaataaaaacagcaagatgtgttgatgtcatgtgcaatagtaattatcaggtgaagtaatgcaatatgtagccagtcacctcatatcaaaaaaatgttgggaggaaaacgtattcgttcatcactaaacctgtgtttatacatctaactgatcgatcagggtttcaaaatccaaattaatacaatgg

SEQ ID NO: 351 - DNA, 200 bp, Amaranthus palmeri
ccattgtattaatttggattttgaaaccctgatcgatcagttagatgtataaacacaggtttagtgatgaacgaatacgttttcctcccaacatttttttgatatgaggtgactggctacatattgcattacttcacctgataattactattgcacatgacatcaacacatcttgctgtttttatttgaccacactagat

SEQ ID NO: 352 - DNA, 200 bp, Amaranthus palmeri
ttcaaaatccaaattaatacaatggcatttgacgaagatatccagaacacatcccccttgtttctgctagataatcaactattctgattctgctgtaatacctcagcttcggccctagccatgggatcgtcctctttttctccttcacgctcctcggccagtttctttctgtgcagttcttcagcagcttctattgaagc

SEQ ID NO: 353 - DNA, 200 bp, Amaranthus palmeri
gcttcaatagaagctgctgaagaactgcacagaaagaaactggccgaggagcgtgaaggagaaaaagaggacgatcccatggctagggccgaagctgaggtattacagcagaatcagaatagttgattatctagcagaaacaagggggatgtgttctggatatcttcgtcaaatgccattgtattaatttggattttgaa

SEQ ID NO: 354 - DNA, 200 bp, Amaranthus palmeri
gttcttcagcagcttctattgaagctttgttctcggcctgaagacgctgcatttcctcttccatttgctgcctctcaaaccatgtatcagcatccgcccaaactgcagacaagtatacaaaagttaaataacgaaagtcttcaaaactgcagatccagtgaacaaagtcattgttgccaatgcccatgcaaaccgcaaaa

SEQ ID NO: 355 - DNA, 200 bp, Amaranthus palmeri
ttttgcggtttgcatgggcattggcaacaatgactttgttcactggatctgcagttttgaagactttcgttatttaacttttgtatacttgtctgcagtttgggcggatgctgatacatggtttgagaggcagcaaatggaagaggaaatgcagcgtcttcaggccgagaacaaagcttcaatagaagctgctgaagaac

SEQ ID NO: 356 - DNA, 200 bp, Amaranthus palmeri
gccaatgcccatgcaaaccgcaaaacagcagggcaaaagaacacaacattgcagcataaagagcaagttcagtgatctacagttactacaaaatttaggtttgggataccagcatgtcaatatgaatgaatttgctaatacatgtaacccaagaactataagtctataactaacaattaagaaaagaaaaccagaagttc

SEQ ID NO: 357 - DNA, 200 bp, Amaranthus palmeri
gaacttctggttttcttttcttaattgttagttatagacttatagttcttgggttacatgtattagcaaattcattcatattgacatgctggtatcccaaacctaaattttgtagtaactgtagatcactgaacttgctctttatgctgcaatgttgtgttcttttgccctgctgttttgcggtttgcatgggcattggc

SEQ ID NO: 358 - DNA, 200 bp, Amaranthus palmeri
attaagaaaagaaaaccagaagttccctaccactggagtattagcaaggtaacgactgcctgctgataagaattattggcctggaagtctggaactatgtgatgatcaacatgtgttgctattctaggtaaaactaatctatcataatataattaaactacaggccccagaattggggtcctgagctattgatcatgctg

SEQ ID NO: 359 - DNA, 200 bp, Amaranthus palmeri
cagcatgatcaatagctcaggaccccaattctggggcctgtagtttaattatattatgatagattagttttacctagaatagcaacacatgttgatcatcacatagttccagacttccaggccaataattcttatcagcaggcagtcgttaccttgctaatactccagtggtagggaacttctggttttcttttcttaat

SEQ ID NO: 360 - DNA, 200 bp, Amaranthus palmeri
gggtcctgagctattgatcatgctgttaaagcaaaagagttgggctgaatgagactagcaattaaaagcataggatacactgaacaatgcttccccctccccatccaaacacgtaggttttagttacacaatagtggcttgagctagaaaaccataaggatatcatagtggacacatcatagttaagttttacataaata

SEQ ID NO: 361 - DNA, 200 bp, Amaranthus palmeri
tatttatgtaaaacttaactatgatgtgtccactatgatatccttatggttttctagctcaagccactattgtgtaactaaaacctacgtgtttggatggggagggggaagcattgttcagtgtatcctatgcttttaattgctagtctcattcagcccaactcttttgctttaacagcatgatcaatagctcaggaccc

SEQ ID NO: 362 - DNA, 200 bp, Amaranthus palmeri
atcatagttaagttttacataaatataccttatacatgtataagcaatacatttccaggttgataggtcagttttatgtctatattgatcgccattctattatgagggaattatattccaataatgggtaatcatcaatgagcagtatttataggaatttattgatagcgtttctattattaggatatagaaattccaat

SEQ ID NO: 363 - DNA, 200 bp, Amaranthus palmeri
attggaatttctatatcctaataatagaaacgctatcaataaattcctataaatactgctcattgatgattacccattattggaatataattccctcataatagaatggcgatcaatatagacataaaactgacctatcaacctggaaatgtattgcttatacatgtataaggtatatttatgtaaaacttaactatgat

SEQ ID NO: 364 - DNA, 200 bp, Amaranthus palmeri
taaaaatgacgttaaatatattttatttttattttgttaatttatgtgttttaattataaagtattaaaaaatacgatgattaataagatactgctacatagacaacttaacctctcaaattggtcaaacccttaaacttaacggttaactaacgttttccattaagtgatagtcatttgcagagatttatattagatta

SEQ ID NO: 365 - DNA, 200 bp, Amaranthus palmeri
taatctaatataaatctctgcaaatgactatcacttaatggaaaacgttagttaaccgttaagtttaagggtttgaccaatttgagaggttaagttgtctatgtagcagtatcttattaatcatcgtattttttaatactttataattaaaacacataaattaacaaaataaaaataaaatatatttaacgtcattttta

SEQ ID NO: 366 - DNA, 200 bp, Amaranthus palmeri
atttgcagagatttatattagattaggtagttttttgcaaaaaaaaaaattacattaggtagttttttgcaaatagacctatagattaggcagtttcttataatttttccttcttattatttgttgtttcagatatggcttcaagaatgaagtttggtaaccaaacttttcaaatttgaagtgagggttggagctctggt

SEQ ID NO: 367 - DNA, 200 bp, Amaranthus palmeri
accagagctccaaccctcacttcaaatttgaaaagtttggttaccaaacttcattcttgaagccatatctgaaacaacaaataataagaaggaaaaattataagaaactgcctaatctataggtctatttgcaaaaaactacctaatgtaatttttttttttgcaaaaaactacctaatctaatataaatctctgcaaat

SEQ ID NO: 368 - DNA, 200 bp, Amaranthus palmeri
ttgaagtgagggttggagctctggtgttggaagccttttttgtaacaccccaaaaattttaggcaaactttatacgtttgtttatccaaaaaaaaaataataaataaataaaaaaaaaaaaattcttaaagtagaaccacttaagggtcggaggtctaggtaataattttggagtgataaatgtaaagattgaagagttt

SEQ ID NO: 369 - DNA, 200 bp, Amaranthus palmeri
aaactcttcaatctttacatttatcactccaaaattattacctagacctccgacccttaagtggttctactttaagaatttttttttttttatttatttattattttttttttggataaacaaacgtataaagtttgcctaaaatttttggggtgttacaaaaaaggcttccaacaccagagctccaaccctcacttcaa

SEQ ID NO: 370 - DNA, 200 bp, Amaranthus palmeri
gataaatgtaaagattgaagagtttgtaactcataccattagttcactcatttacctcaatttatgattataattaagtattacaaaaaaaaggggaaacaatcacttcatattccaaaggtgaagcttttaatagtgaaggaaaaggatttcttaagcaatacagtattaaacgtaaactaaaaaaaataataaatcat

SEQ ID NO: 371 - DNA, 200 bp, Amaranthus palmeri
atgatttattattttttttagtttacgtttaatactgtattgcttaagaaatccttttccttcactattaaaagcttcacctttggaatatgaagtgattgtttccccttttttttgtaatacttaattataatcataaattgaggtaaatgagtgaactaatggtatgagttacaaactcttcaatctttacatttatc

SEQ ID NO: 372 - DNA, 200 bp, Amaranthus palmeri
taaactaaaaaaaataataaatcatatcttaattttgagaagttttattcttaatttgtttatccctatcaatactaagcttgggataataaacaaagggttatcaaggttggaggatttttaatttcgagattatatacttgaattgaagaaattttatgttcaagagaattatattagaggaatatttgtaaggctat

SEQ ID NO: 373 - DNA, 200 bp, Amaranthus palmeri
atagccttacaaatattcctctaatataattctcttgaacataaaatttcttcaattcaagtatataatctcgaaattaaaaatcctccaaccttgataaccctttgtttattatcccaagcttagtattgatagggataaacaaattaagaataaaacttctcaaaattaagatatgatttattattttttttagttta

SEQ ID NO: 374 - DNA, 200 bp, Amaranthus palmeri
attagaggaatatttgtaaggctattatctacaattcttcatatttctctaattgaaatatatataaaggtaactagtttaccctctcttttcttaattcatatacattgttattttttttattatatggaaaatataaaacggaaaaaaaaatgtaaattaaacttatcttagttttgagataattgatgttatatagt

SEQ ID NO: 375 - DNA, 200 bp, Amaranthus palmeri
actatataacatcaattatctcaaaactaagataagtttaatttacatttttttttccgttttatattttccatataataaaaaaaataacaatgtatatgaattaagaaaagagagggtaaactagttacctttatatatatttcaattagagaaatatgaagaattgtagataatagccttacaaatattcctctaat

SEQ ID NO: 376 - DNA, 200 bp, Amaranthus palmeri
tttgagataattgatgttatatagtcttataatgttgattaacgttgaaaattgaattacaaaactaaataatttaaacatatgatttgttaacttctactaattaaatcttggttaggggtgatttagttgatttgagaaatatccaaataaataattagattagtttggtgaaataatatttttttttgacttcgaaa

SEQ ID NO: 377 - DNA, 200 bp, Amaranthus palmeri
tttcgaagtcaaaaaaaaatattatttcaccaaactaatctaattatttatttggatatttctcaaatcaactaaatcacccctaaccaagatttaattagtagaagttaacaaatcatatgtttaaattatttagttttgtaattcaattttcaacgttaatcaacattataagactatataacatcaattatctcaaa

SEQ ID NO: 378 - DNA, 200 bp, Amaranthus palmeri
ataatatttttttttgacttcgaaaacaatgggttaatttggcacactaatttggaatgtacaaataagttcattagagtagagcttcttaaattatgttttggtatagttaaaagtgatgttaatgtatggttaatattttataaatattttatatattttgtttagttgaattggccacttaatgaatttgtacattg

SEQ ID NO: 379 - DNA, 200 bp, Amaranthus palmeri
caatgtacaaattcattaagtggccaattcaactaaacaaaatatataaaatatttataaaatattaaccatacattaacatcacttttaactataccaaaacataatttaagaagctctactctaatgaacttatttgtacattccaaattagtgtgccaaattaacccattgttttcgaagtcaaaaaaaaatattat

SEQ ID NO: 380 - DNA, 200 bp, Amaranthus palmeri
ggccacttaatgaatttgtacattgctgttaaaaaaaaagagaggatattaatcgtttggtacaacagcataattgagcaaatcataaatctgccaaaattcaagtaattaaaaataattatcaattaacagttatacaagtgtatgtatgtggcattagcctaattgattgcgcaaggactaaataattacttattcag

SEQ ID NO: 381 - DNA, 200 bp, Amaranthus palmeri
ctgaataagtaattatttagtccttgcgcaatcaattaggctaatgccacatacatacacttgtataactgttaattgataattatttttaattacttgaattttggcagatttatgatttgctcaattatgctgttgtaccaaacgattaatatcctctctttttttttaacagcaatgtacaaattcattaagtggcc

SEQ ID NO: 382 - DNA, 200 bp, Amaranthus palmeri
aaggactaaataattacttattcaggtaatttagtattttatccaggttaattagaggttagttgagttgattatgatcaatattttggttaaatataaattttggcaaagaaaaatgagtattaatattgtatttattttgagactcgacaatttttagttgaattgttactttctaagatgttaagagtgttgttgac

SEQ ID NO: 383 - DNA, 200 bp, Amaranthus palmeri
gtcaacaacactcttaacatcttagaaagtaacaattcaactaaaaattgtcgagtctcaaaataaatacaatattaatactcatttttctttgccaaaatttatatttaaccaaaatattgatcataatcaactcaactaacctctaattaacctggataaaatactaaattacctgaataagtaattatttagtcctt

SEQ ID NO: 384 - DNA, 200 bp, Amaranthus palmeri
tcaaattggtcaaacccttaaacgatcaactaacgttttccattaagtggtagtcatttgcaaagaaatatattatattatgtagttttttacaaaaaaagaaaactacattaggcagttttttgcaaatagacctattagattttttttttaatttttccttcttgttatttgctgtttctaatgtggcttcaaaaatg

SEQ ID NO: 385 - DNA, 200 bp, Amaranthus palmeri
catttttgaagccacattagaaacagcaaataacaagaaggaaaaattaaaaaaaaaatctaataggtctatttgcaaaaaactgcctaatgtagttttctttttttgtaaaaaactacataatataatatatttctttgcaaatgactaccacttaatggaaaacgttagttgatcgtttaagggtttgaccaatttga

SEQ ID NO: 386 - DNA, 200 bp, Amaranthus palmeri
tgtttctaatgtggcttcaaaaatgaagtttggtaaccaaacttttcaaatttgaagtgagggttgggaagccttttggtgtcccttctattaagagttggggcctcacaatcactagataacgtgcctttctctcatgccttacctttctaattcttagaatagaaaaaagacggtgaattttttatacgctgtatgat

SEQ ID NO: 387 - DNA, 200 bp, Amaranthus palmeri
atcatacagcgtataaaaaattcaccgtcttttttctattctaagaattagaaaggtaaggcatgagagaaaggcacgttatctagtgattgtgaggccccaactcttaatagaagggacaccaaaaggcttcccaaccctcacttcaaatttgaaaagtttggttaccaaacttcatttttgaagccacattagaaaca

SEQ ID NO: 388 - DNA, 200 bp, Amaranthus palmeri
gtgaattttttatacgctgtatgattacattttttgaaatctctccgatcatcttgatcatgggatggaattgttcgtgcacatgttttttaagaatggaatctaagcatagtgtattagagagaatgagtgaaagttagtggaaagaaaaattgagttggagaataaaataaaaaacaagtgggtaatagaaataagtg

SEQ ID NO: 389 - DNA, 200 bp, Amaranthus palmeri
cacttatttctattacccacttgttttttattttattctccaactcaatttttctttccactaactttcactcattctctctaatacactatgcttagattccattcttaaaaaacatgtgcacgaacaattccatcccatgatcaagatgatcggagagatttcaaaaaatgtaatcatacagcgtataaaaaattcac

SEQ ID NO: 390 - DNA, 200 bp, Amaranthus palmeri
aacaagtgggtaatagaaataagtggttacgatgaagagggtgtataaatttgtagataagattaaaaggggtgggagtaccattgttataaaagaaaagagtgcaaaatccgttggacgaatttaaataaaaagtggtgtaaaatgaaaggaacgacaagaatatgattttcccagctataacactgtcacaaatgtaa

SEQ ID NO: 391 - DNA, 200 bp, Amaranthus palmeri
ttacatttgtgacagtgttatagctgggaaaatcatattcttgtcgttcctttcattttacaccactttttatttaaattcgtccaacggattttgcactcttttcttttataacaatggtactcccaccccttttaatcttatctacaaatttatacaccctcttcatcgtaaccacttatttctattacccacttgtt

SEQ ID NO: 392 - DNA, 200 bp, Amaranthus palmeri
tcagatatgtcttcataaagtattcaagtttgagcatgaaaatccacatgtacatgacatgagtatgcaaatgcaagtaatacaaacacataggcaaaagagatgatgtaatcactattcggtaatcgctcgcgcacaaatagtagctcactatatgaatgagatgagaaaatttcaattgttgtaaaggcgagttcctt

SEQ ID NO: 393 - DNA, 200 bp, Amaranthus palmeri
aaggaactcgcctttacaacaattgaaattttctcatctcattcatatagtgagctactatttgtgcgcgagcgattaccgaatagtgattacatcatctcttttgcctatgtgtttgtattacttgcatttgcatactcatgtcatgtacatgtggattttcatgctcaaacttgaatactttatgaagacatatctga

SEQ ID NO: 394 - DNA, 200 bp, Amaranthus palmeri
caattgttgtaaaggcgagttccttatgttttagtccaacagtgttttgtaacctttgtgtaattttttatatgaagcacaagagcaggtctcaaataagtacaggagataaatgaaactagaaataaaagtgttcaatatacttggacatagtcacatagttaatgccaaaatccatctttctgataagttggggccac

SEQ ID NO: 395 - DNA, 200 bp, Amaranthus palmeri
gtggccccaacttatcagaaagatggattttggcattaactatgtgactatgtccaagtatattgaacacttttatttctagtttcatttatctcctgtacttatttgagacctgctcttgtgcttcatataaaaaattacacaaaggttacaaaacactgttggactaaaacataaggaactcgcctttacaacaattg

SEQ ID NO: 396 - DNA, 200 bp, Amaranthus palmeri
catctttctgataagttggggccacttatacactatactaacatgagcctggaaagaaatagccagcaggaccgcaggtatagattgttagctaggaaaaccacaaaaccatactccctccatattaaaatgacattaacaagtgattagtaatgtaataacctacttacatattctaacaagtgattaatttcaatagt

SEQ ID NO: 397 - DNA, 200 bp, Amaranthus palmeri
actattgaaattaatcacttgttagaatatgtaagtaggttattacattactaatcacttgttaatgtcattttaatatggagggagtatggttttgtggttttcctagctaacaatctatacctgcggtcctgctggctatttctttccaggctcatgttagtatagtgtataagtggccccaacttatcagaaagatg

SEQ ID NO: 398 - DNA, 200 bp, Amaranthus palmeri
ctaacaagtgattaatttcaatagtattccgacaaaatgtagctttaataattatcttccatctcatcaaatttgtttgggaaatttgtaacactgatcaatgactctagcacaaggaatagctaaaattatcatcatcatcatgatcatcttgactagtgtatcccactcataaggaaactatgatcagggtctggaaa

SEQ ID NO: 399 - DNA, 200 bp, Amaranthus palmeri
tttccagaccctgatcatagtttccttatgagtgggatacactagtcaagatgatcatgatgatgatgataattttagctattccttgtgctagagtcattgatcagtgttacaaatttcccaaacaaatttgatgagatggaagataattattaaagctacattttgtcggaatactattgaaattaatcacttgttag

SEQ ID NO: 400 - DNA, 200 bp, Amaranthus palmeri
ggaaactatgatcagggtctggaaagggaaggaaggcgacaaatcataccataaagggagtttagaggtaatgaatacctaaatcctgatcctaaaacaattgatcttccccattaccacgccaatatcaacccacaaagcatccggggaaagtcaaacaaagggaaaaatcacaattgaaatatcctagtttcaagttt

SEQ ID NO: 401 - DNA, 200 bp, Amaranthus palmeri
aaacttgaaactaggatatttcaattgtgatttttccctttgtttgactttccccggatgctttgtgggttgatattggcgtggtaatggggaagatcaattgttttaggatcaggatttaggtattcattacctctaaactccctttatggtatgatttgtcgccttccttccctttccagaccctgatcatagtttcc

SEQ ID NO: 402 - DNA, 200 bp, Amaranthus palmeri
attgaaatatcctagtttcaagtttcaaccaattgggtaccatttacccatgttcaagtgtagcaaaaaccctaatatagcatcttaatacagctccagtaaacattatgcagtcttaatctgaagctactataccaaaacgactaacatttaacaaatgccattccaccattaaaaaaaagggtgttttagcggtaatg

SEQ ID NO: 403 - DNA, 200 bp, Amaranthus palmeri
cattaccgctaaaacacccttttttttaatggtggaatggcatttgttaaatgttagtcgttttggtatagtagcttcagattaagactgcataatgtttactggagctgtattaagatgctatattagggtttttgctacacttgaacatgggtaaatggtacccaattggttgaaacttgaaactaggatatttcaat

SEQ ID NO: 404 - DNA, 200 bp, Amaranthus palmeri
aaaaaagggtgttttagcggtaatgagttgatcggtcaatgtcaatccgagtaagaaaaaattaacacaatgcaaacccatttgccatgtttcaacacacaaacacaaaacactgataattccacaaatctgatactacaagcagcacaacagtcaattgcaaacataaccaaaaaaagctaaataaacagcagaacctg

SEQ ID NO: 405 - DNA, 200 bp, Amaranthus palmeri
caggttctgctgtttatttagctttttttggttatgtttgcaattgactgttgtgctgcttgtagtatcagatttgtggaattatcagtgttttgtgtttgtgtgttgaaacatggcaaatgggtttgcattgtgttaattttttcttactcggattgacattgaccgatcaactcattaccgctaaaacaccctttttt

SEQ ID NO: 406 - DNA, 200 bp, Amaranthus palmeri
aaagctaaataaacagcagaacctgggatcggaaaagggtggtcggcgtcgtgaacaaactagagagagaaagatgaatatagagagataaaggagtgagaaagaaggaaggagagtaagcagaatgaaatgggtagtgtggagtgtggaataatggttgaaaatgaagtgtggctcttccatagaggatagggatgctg

SEQ ID NO: 407 - DNA, 200 bp, Amaranthus palmeri
cagcatccctatcctctatggaagagccacacttcattttcaaccattattccacactccacactacccatttcattctgcttactctccttccttctttctcactcctttatctctctatattcatctttctctctctagtttgttcacgacgccgaccacccttttccgatcccaggttctgctgtttatttagcttt

SEQ ID NO: 408 - DNA, 200 bp, Amaranthus palmeri
tcttccatagaggatagggatgctgaaattgagtggtgaataaacaatctgaacaagatttggagaatgcaaaagaatctctggactaaattaatggaaaatcaaattgtatgtaatgatttagatatttaattagggttcttgtttgtgtctactcattctgtcactcacatgcatgctcattgtttgtatcaatctaa

SEQ ID NO: 409 - DNA, 200 bp, Amaranthus palmeri
ttagattgatacaaacaatgagcatgcatgtgagtgacagaatgagtagacacaaacaagaaccctaattaaatatctaaatcattacatacaatttgattttccattaatttagtccagagattcttttgcattctccaaatcttgttcagattgtttattcaccactcaatttcagcatccctatcctctatggaaga

SEQ ID NO: 410 - DNA, 200 bp, Amaranthus palmeri
atgctcattgtttgtatcaatctaaagccaagcattgactttttgggaaagccaaatagagaaaacaatatcctaaaggggaaatggactcataaaacgtgattgttactcccacctacagatgttcattcgggtcatcgagttgatttagggtcaggtgtttcgggtaggttcaaaatcgggttttgtgttcacattga

SEQ ID NO: 411 - DNA, 200 bp, Amaranthus palmeri
tcaatgtgaacacaaaacccgattttgaacctacccgaaacacctgaccctaaatcaactcgatgacccgaatgaacatctgtaggtgggagtaacaatcacgttttatgagtccatttcccctttaggatattgttttctctatttggctttcccaaaaagtcaatgcttggctttagattgatacaaacaatgagcat

SEQ ID NO: 412 - DNA, 200 bp, Amaranthus palmeri
aaatcgggttttgtgttcacattgatttttacatgattttaaattcatattgacgtcgggtcaagtcggattagattattaactcgggtaaatatcggatcatcgggtctgttttgaacacctctagtattttccaagttttgttgtatcacacatgcttgttgtggatgacctaaaattctttactgctgaaacgggac

SEQ ID NO: 413 - DNA, 200 bp, Amaranthus palmeri
gtcccgtttcagcagtaaagaattttaggtcatccacaacaagcatgtgtgatacaacaaaacttggaaaatactagaggtgttcaaaacagacccgatgatccgatatttacccgagttaataatctaatccgacttgacccgacgtcaatatgaatttaaaatcatgtaaaaatcaatgtgaacacaaaacccgattt

SEQ ID NO: 414 - DNA, 200 bp, Amaranthus palmeri
aaattctttactgctgaaacgggacattctgtgttgcgttacatttggtttttagtagaatataagtttcggtgggttgttaaggcaaaaaacaagcagatgagaagaaatgtgtggctgagatgaatagagagatttttgcggatagaactaggaaagggcacgtgggttcatatccgtaagtaaaaagttagcatata

SEQ ID NO: 415 - DNA, 200 bp, Amaranthus palmeri
tatatgctaactttttacttacggatatgaacccacgtgccctttcctagttctatccgcaaaaatctctctattcatctcagccacacatttcttctcatctgcttgttttttgccttaacaacccaccgaaacttatattctactaaaaaccaaatgtaacgcaacacagaatgtcccgtttcagcagtaaagaattt

SEQ ID NO: 416 - DNA, 200 bp, Amaranthus palmeri
tccgtaagtaaaaagttagcatataactatagaacaccgaaaaatgaaaaatgtagcgaattgataagtgatcatatgcaatataaagttctggtgttttctgatatattcttttgtgactaaattgaacgggaaaccatcaaaaataatcgtctgtcaaggtattgaaaatcctaacttgggctatcggtgtaggtaac

SEQ ID NO: 417 - DNA, 200 bp, Amaranthus palmeri
gttacctacaccgatagcccaagttaggattttcaataccttgacagacgattatttttgatggtttcccgttcaatttagtcacaaaagaatatatcagaaaacaccagaactttatattgcatatgatcacttatcaattcgctacatttttcatttttcggtgttctatagttatatgctaactttttacttacgga

SEQ ID NO: 418 - DNA, 200 bp, Amaranthus palmeri
aacttgggctatcggtgtaggtaaccataagggtggactttcagtgggaaaagcgatggcctccggatgcaaggctgcggaacttgtaatatcctatctggactctcatttatatgtgaagatggatgagaagaccgtgtaattcttctctgggaacgtcccctgattttgcgtctgtatatccgatgatatgtcgttgg

SEQ ID NO: 419 - DNA, 200 bp, Amaranthus palmeri
ccaacgacatatcatcggatatacagacgcaaaatcaggggacgttcccagagaagaattacacggtcttctcatccatcttcacatataaatgagagtccagataggatattacaagttccgcagccttgcatccggaggccatcgcttttcccactgaaagtccacccttatggttacctacaccgatagcccaagtt

SEQ ID NO: 420 - DNA, 200 bp, Amaranthus palmeri
tgtatatccgatgatatgtcgttggattgatcacgattgtagtcacgtttaggagttgtgcagtgacttttctgcctaaagactggatctgttagaaacaaatagtctatagatagtttctttgctcatcaggttatctttcttacaccagttgtgtatacaaatgttgcatagcctaacctaaattctaaaatgccatt

SEQ ID NO: 421 - DNA, 200 bp, Amaranthus palmeri
aatggcattttagaatttaggttaggctatgcaacatttgtatacacaactggtgtaagaaagataacctgatgagcaaagaaactatctatagactatttgtttctaacagatccagtctttaggcagaaaagtcactgcacaactcctaaacgtgactacaatcgtgatcaatccaacgacatatcatcggatataca

SEQ ID NO: 422 - DNA, 200 bp, Amaranthus palmeri
ctaacctaaattctaaaatgccattcccttttatatagggtcatgttttttgcatttatgaatggtgaaattttagatcttcactgagaataaaggttttggcaatttcataatggtgcttattaggggtatttaaaaccggatattggcaattttcattgataatattgtaatggaaaaatgacgttaaatatcttttt

SEQ ID NO: 423 - DNA, 200 bp, Amaranthus palmeri
aaaaagatatttaacgtcatttttccattacaatattatcaatgaaaattgccaatatccggttttaaatacccctaataagcaccattatgaaattgccaaaacctttattctcagtgaagatctaaaatttcaccattcataaatgcaaaaaacatgaccctatataaaagggaatggcattttagaatttaggttag

SEQ ID NO: 424 - DNA, 200 bp, Amaranthus rudis
acactcaaaactattcaggaaaggaaaaataatcctccaccccctcgagacccgtccgtaatcaccattacttattgctttccatcaccttgaatcttaccttaatatacatgtatttaattgataatgtcacattgcctcatttgcagccgccttcctaaacctaagggccagactgttggatcctttaggaaagggct

SEQ ID NO: 425 - DNA, 200 bp, Amaranthus rudis
agccctttcctaaaggatccaacagtctggcccttaggtttaggaaggcggctgcaaatgaggcaatgtgacattatcaattaaatacatgtatattaaggtaagattcaaggtgatggaaagcaataagtaatggtgattacggacgggtctcgagggggtggaggattatttttcctttcctgaatagttttgagtgt

SEQ ID NO: 426 - DNA, 200 bp, Amaranthus rudis
ctgttggatcctttaggaaagggctcattatgttacctaccgccattgctgctaggtatcttttgactctcaaaccttatatatttctcatcttctccttctgccagtgccatactaatactagtatctttaccatatattttttatttttttaggcttggcagtaaagtcaaactatcgtggacactttctaatattga

SEQ ID NO: 427 - DNA, 200 bp, Amaranthus rudis
tcaatattagaaagtgtccacgatagtttgactttactgccaagcctaaaaaaataaaaaatatatggtaaagatactagtattagtatggcactggcagaaggagaagatgagaaatatataaggtttgagagtcaaaagatacctagcagcaatggcggtaggtaacataatgagccctttcctaaaggatccaacag

SEQ ID NO: 428 - DNA, 200 bp, Amaranthus rudis
tatcgtggacactttctaatattgataagtcgctcaatggagaatacaatctcacttatcaaacacccgatggaccggtttctgttaggaccaaagcggttgtcatgaccgtcccttcgtacattgcaagtagcttgcttcgtccgctctcagtgagtatcattctttccttcatttctattcttttaatgctatccaat

SEQ ID NO: 429 - DNA, 200 bp, Amaranthus rudis
attggatagcattaaaagaatagaaatgaaggaaagaatgatactcactgagagcggacgaagcaagctacttgcaatgtacgaagggacggtcatgacaaccgctttggtcctaacagaaaccggtccatcgggtgtttgataagtgagattgtattctccattgagcgacttatcaatattagaaagtgtccacgata

SEQ ID NO: 430 - DNA, 200 bp, Amaranthus rudis
agagagtgcgagagagatgagtgcgatggcgttatcgagcagcattctacaatgtccgccgcactccgacatctcgttccgcttttttgctcatacacgaacccaatcccccatcttcttcggaagaccacgaaaattatcatatatccattgttccacaagctcaagctcaactgccaattaccagaacaccattacga

SEQ ID NO: 431 - DNA, 200 bp, Amaranthus rudis
tcgtaatggtgttctggtaattggcagttgagcttgagcttgtggaacaatggatatatgataattttcgtggtcttccgaagaagatgggggattgggttcgtgtatgagcaaaaaagcggaacgagatgtcggagtgcggcggacattgtagaatgctgctcgataacgccatcgcactcatctctctcgcactctct

SEQ ID NO: 432 - DNA, 200 bp, Amaranthus rudis
gccaattaccagaacaccattacgagccaaggagaaggagataaagtattagattgtgtaattgttggagctggtatcagtggactttgcattgctcaggctctttctaccaaacacattcaatccaatctcaatttcattgtcactgaagctaaacatcgtgttggaggtaatatcactaccatggagtccgatggcta

SEQ ID NO: 433 - DNA, 200 bp, Amaranthus rudis
tagccatcggactccatggtagtgatattacctccaacacgatgtttagcttcagtgacaatgaaattgagattggattgaatgtgtttggtagaaagagcctgagcaatgcaaagtccactgataccagctccaacaattacacaatctaatactttatctccttctccttggctcgtaatggtgttctggtaattggc

SEQ ID NO: 434 - DNA, 200 bp, Amaranthus rudis
tcactaccatggagtccgatggctatatctgggaagagggtcctaatagtttccaaccctccgatcctgtgcttactatggcggtaaactgattcttctctctttctccaatttttgatcattctattcaattttccccttattgaatcaaaatcaaattccaggttgacagtggattaaaagacgatttggtcttggga

SEQ ID NO: 435 - DNA, 200 bp, Amaranthus rudis
tcccaagaccaaatcgtcttttaatccactgtcaacctggaatttgattttgattcaataaggggaaaattgaatagaatgatcaaaaattggagaaagagagaagaatcagtttaccgccatagtaagcacaggatcggagggttggaaactattaggaccctcttcccagatatagccatcggactccatggtagtga

SEQ ID NO: 436 - DNA, 200 bp, Amaranthus rudis
attaaaagacgatttggtcttgggagatcctaatgcccctcgtttcgtgctctggaatggtaaattaaggcctgttccttccaaacctacggaccttcccttttttgatctcatgagctttcctggtaagattagggctggtcttggtgcacttggtcttcgtcctcctcctcctcctccttcttatgaggaatctgttg

SEQ ID NO: 437 - DNA, 200 bp, Amaranthus rudis
caacagattcctcataagaaggaggaggaggaggaggacgaagaccaagtgcaccaagaccagccctaatcttaccaggaaagctcatgagatcaaaaaagggaaggtccgtaggtttggaaggaacaggccttaatttaccattccagagcacgaaacgaggggcattaggatctcccaagaccaaatcgtcttttaat

SEQ ID NO: 438 - DNA, 200 bp, Amaranthus rudis
cctccttcttatgaggaatctgttgaagaatttgtgcgccgtaatctcggcgatgaggtcttcgaacgcttgatcgaacccttttgttctggtacctaccctgtttaatttttcaattttcccccttttttctctactactactttattgattcttatccatgagtgtactatgggagttgacaataattgttcaggtgt

SEQ ID NO: 439 - DNA, 200 bp, Amaranthus rudis
acacctgaacaattattgtcaactcccatagtacactcatggataagaatcaataaagtagtagtagagaaaaaagggggaaaattgaaaaattaaacagggtaggtaccagaacaaaagggttcgatcaagcgttcgaagacctcatcgccgagattacggcgcacaaattcttcaacagattcctcataagaaggagg

SEQ ID NO: 440 - DNA, 200 bp, Amaranthus rudis
atggtaattcaatccattacccacctttcaccaaaccttgcattgccatcgccattgtcagtttccaccaagaactacccagtagctgtaatgggcaacatttctgagcgggaagaacccacttctgctaaaagggttgctgttgttggtgctggagttagtggacttgctgctgcatataagctaaaatcccatggttt

SEQ ID NO: 441 - DNA, 200 bp, Amaranthus rudis
aaaccatgggattttagcttatatgcagcagcaagtccactaactccagcaccaacaacagcaacccttttagcagaagtgggttcttcccgctcagaaatgttgcccattacagctactgggtagttcttggtggaaactgacaatggcgatggcaatgcaaggtttggtgaaaggtgggtaatggattgaattaccat

SEQ ID NO: 442 - DNA, 200 bp, Amaranthus rudis
catataagctaaaatcccatggtttgagtgtgacattgtttgaagctgattctagagctggaggcaaacttaaaactgttaaaaaagatggttttatttgggatgagggggcaaatactatgacagaaagtgaggcagaggtctcgagtttgatcgatgatcttgggcttcgtgagaagcaacagttgccaatttcacaa

SEQ ID NO: 443 - DNA, 200 bp, Amaranthus rudis
ttgtgaaattggcaactgttgcttctcacgaagcccaagatcatcgatcaaactcgagacctctgcctcactttctgtcatagtatttgccccctcatcccaaataaaaccatcttttttaacagttttaagtttgcctccagctctagaatcagcttcaaacaatgtcacactcaaaccatgggattttagcttatatg

SEQ ID NO: 444 - DNA, 200 bp, Amaranthus rudis
gaagcaacagttgccaatttcacaaaataaaagatacatagctagagacggtcttcctgtgctactaccttcaaatcccgctgcactactcacgagcaatatcctttcagcaaaatcaaagctgcaaattatgttggaaccatttctctggagaaaacacaatgctactgaactttctgatgagcatgttcaggaaagcg

SEQ ID NO: 445 - DNA, 200 bp, Amaranthus rudis
cgctttcctgaacatgctcatcagaaagttcagtagcattgtgttttctccagagaaatggttccaacataatttgcagctttgattttgctgaaaggatattgctcgtgagtagtgcagcgggatttgaaggtagtagcacaggaagaccgtctctagctatgtatcttttattttgtgaaattggcaactgttgcttc

SEQ ID NO: 446 - DNA, 200 bp, Amaranthus rudis
tctgatgagcatgttcaggaaagcgttggtgaattttttgagcgacattttgggaaagagtttgttgattatgttattgacccttttgttgcgggtacatgtggtggagatcctcaatcgctttccatgcaccatacatttccagaagtatggaatattgaaaaaaggtttggctctgtgtttgctggactaattcaatc

SEQ ID NO: 447 - DNA, 200 bp, Amaranthus rudis
gattgaattagtccagcaaacacagagccaaaccttttttcaatattccatacttctggaaatgtatggtgcatggaaagcgattgaggatctccaccacatgtacccgcaacaaaagggtcaataacataatcaacaaactctttcccaaaatgtcgctcaaaaaattcaccaacgctttcctgaacatgctcatcaga

SEQ ID NO: 448 - DNA, 200 bp, Amaranthus rudis
ctgtgtttgctggactaattcaatcaacattgttatctaagaaggaaaagggtggagaaaatgcttctattaagaagcctcgtgtacgtggttcattttcatttcaaggtggaatgcagacacttgttgacacaatgtgcaaacagcttggtgaagatgaactcaaactccagtgtgaggtgctgtccttgtcatataac

SEQ ID NO: 449 - DNA, 200 bp, Amaranthus rudis
gttatatgacaaggacagcacctcacactggagtttgagttcatcttcaccaagctgtttgcacattgtgtcaacaagtgtctgcattccaccttgaaatgaaaatgaaccacgtacacgaggcttcttaatagaagcattttctccacccttttccttcttagataacaatgttgattgaattagtccagcaaacacag

SEQ ID NO: 450 - DNA, 200 bp, Amaranthus rudis
tgaggtgctgtccttgtcatataaccagaaggggatcccctcattagggaattggtcagtctcttctatgtcaaataataccagtgaagatcaatcttatgatgctgtggttgtcactgctccaattcgcaatgtcaaagaaatgaagattatgaaatttggaaatccattttcacttgactttattccagaggtgacgt

SEQ ID NO: 451 - DNA, 200 bp, Amaranthus rudis
acgtcacctctggaataaagtcaagtgaaaatggatttccaaatttcataatcttcatttctttgacattgcgaattggagcagtgacaaccacagcatcataagattgatcttcactggtattatttgacatagaagagactgaccaattccctaatgaggggatccccttctggttatatgacaaggacagcacctca

SEQ ID NO: 452 - DNA, 200 bp, Amaranthus rudis
cttgactttattccagaggtgacgtacgtacccctttccgttatgattactgcattcaaaaaggataaagtgaagagacctcttgagggcttcggagttcttatcccctctaaagagcaacataatggactgaagactcttggtactttattttcctccatgatgtttcctgatcgtgctccatctgacatgtgtctctt

SEQ ID NO: 453 - DNA, 200 bp, Amaranthus rudis
aagagacacatgtcagatggagcacgatcaggaaacatcatggaggaaaataaagtaccaagagtcttcagtccattatgttgctctttagaggggataagaactccgaagccctcaagaggtctcttcactttatcctttttgaatgcagtaatcataacggaaaggggtacgtacgtcacctctggaataaagtcaag

SEQ ID NO: 454 - DNA, 200 bp, Amaranthus rudis
gtgctccatctgacatgtgtctctttactacatttgtcggaggaagcagaaatagaaaacttgcaaacgcttcaacggatgaattgaagcaaatagtttcttctgaccttcagcagctgttgggcactgaggacgaaccttcatttgtcaatcatctcttttggagcaacgcattcccattgtatggacacaattacgat

SEQ ID NO: 455 - DNA, 200 bp, Amaranthus rudis
atcgtaattgtgtccatacaatgggaatgcgttgctccaaaagagatgattgacaaatgaaggttcgtcctcagtgcccaacagctgctgaaggtcagaagaaactatttgcttcaattcatccgttgaagcgtttgcaagttttctatttctgcttcctccgacaaatgtagtaaagagacacatgtcagatggagcac

SEQ ID NO: 456 - DNA, 200 bp, Amaranthus rudis
cccattgtatggacacaattacgattctgttttgagagccatagacaagatggaaaaggatcttcctggatttttttatgcaggtaaccataagggtggactttcagtgggaaaagcgatggcctccggatgcaaggctgcggaacttgtaatatcctatctggactctcatatatacgtgaagatggatgagaagaccg

SEQ ID NO: 457 - DNA, 200 bp, Amaranthus rudis
cggtcttctcatccatcttcacgtatatatgagagtccagataggatattacaagttccgcagccttgcatccggaggccatcgcttttcccactgaaagtccacccttatggttacctgcataaaaaaatccaggaagatccttttccatcttgtctatggctctcaaaacagaatcgtaattgtgtccatacaatggg

SEQ ID NO: 458 - DNA, 200 bp, Amaranthus rudis
attaagttttgatgtttttagctgcaataatttgttgatgaaaaagccactacttttttctcagctgcaaattatgttggaaccatttctctggagaaaacacaatgctactgaactttctgatgagcatgttcaggaaaggcaagtgccacatactattaagtgttagttgctgagaatatatttgaatctaagatgca

SEQ ID NO: 459 - DNA, 200 bp, Amaranthus rudis
tgcatcttagattcaaatatattctcagcaactaacacttaatagtatgtggcacttgcctttcctgaacatgctcatcagaaagttcagtagcattgtgttttctccagagaaatggttccaacataatttgcagctgagaaaaaagtagtggctttttcatcaacaaattattgcagctaaaaacatcaaaacttaat

SEQ ID NO: 460 - DNA, 200 bp, Amaranthus rudis
agaatatatttgaatctaagatgcacgaagaccactggtgcccttgctctatcaattctgatggaaaggattatcgctgaatttaccttctactaaaacatcgataaaatacttcattattagcatcaaaagattccctccatccttctggttttgctagacttgccttatgaaggtgttcaaggagtagtttgctaccc

SEQ ID NO: 461 - DNA, 200 bp, Amaranthus rudis
gggtagcaaactactccttgaacaccttcataaggcaagtctagcaaaaccagaaggatggagggaatcttttgatgctaataatgaagtattttatcgatgttttagtagaaggtaaattcagcgataatcctttccatcagaattgatagagcaagggcaccagtggtcttcgtgcatcttagattcaaatatattct

SEQ ID NO: 462 - DNA, 200 bp, Amaranthus rudis
gtgttcaaggagtagtttgctacccttcaagatagggtagtggttgccgtctctcataatttcagtcactcgttttcctctcctaattcaagccataatttttatggttcctccacacaacacttgctaaatttgaaaagtagcaaagaggaagtgagcaaaatcagcaggagtaggactgatgagtaagagcttgatta

SEQ ID NO: 463 - DNA, 200 bp, Amaranthus rudis
taatcaagctcttactcatcagtcctactcctgctgattttgctcacttcctctttgctacttttcaaatttagcaagtgttgtgtggaggaaccataaaaattatggcttgaattaggagaggaaaacgagtgactgaaattatgagagacggcaaccactaccctatcttgaagggtagcaaactactccttgaacac

SEQ ID NO: 464 - DNA, 200 bp, Amaranthus rudis
ggactgatgagtaagagcttgattaagtgtagaggattttcttttgtgttgaatatgaatgcatcatgcatgactgtagaattgacataatgatttgtctgcagcgttggtgaattttttgagcgacattttgggaaagaggtattgttgccaattgccatgctctattcattccggtgaattaacaaatgttgtgcttc

SEQ ID NO: 465 - DNA, 200 bp, Amaranthus rudis
gaagcacaacatttgttaattcaccggaatgaatagagcatggcaattggcaacaatacctctttcccaaaatgtcgctcaaaaaattcaccaacgctgcagacaaatcattatgtcaattctacagtcatgcatgatgcattcatattcaacacaaaagaaaatcctctacacttaatcaagctcttactcatcagtcc

SEQ ID NO: 466 - DNA, 200 bp, Amaranthus rudis
ggtgaattaacaaatgttgtgcttctgcttactattgcttataattattgtttgttgcagtttgttgattatgttattgacccttttgttgcgggtacatgtggtggagatcctcaatcgctttccgtgagttaaatactgtgcttgcttttttttttttcaacattttctggaggctgtaaataaattatactcctttc

SEQ ID NO: 467 - DNA, 200 bp, Amaranthus rudis
gaaaggagtataatttatttacagcctccagaaaatgttgaaaaaaaaaaaagcaagcacagtatttaactcacggaaagcgattgaggatctccaccacatgtacccgcaacaaaagggtcaataacataatcaacaaactgcaacaaacaataattataagcaatagtaagcagaagcacaacatttgttaattcacc

SEQ ID NO: 468 - DNA, 200 bp, Amaranthus rudis
gctgtaaataaattatactcctttctattctaatcaaatatcctatttccccttttggcatattcaaatttagttaaatattgtgtaaattatttacacaattgccattaaattttcacttttcccttactcactcttctcatgtgtcccttcccccttttcttaaaattggtgcattatcaaataggacatttgatttg

SEQ ID NO: 469 - DNA, 200 bp, Amaranthus rudis
caaatcaaatgtcctatttgataatgcaccaattttaagaaaagggggaagggacacatgagaagagtgagtaagggaaaagtgaaaatttaatggcaattgtgtaaataatttacacaatatttaactaaatttgaatatgccaaaaggggaaataggatatttgattagaatagaaaggagtataatttatttacagc

SEQ ID NO: 470 - DNA, 200 bp, Amaranthus rudis
attatcaaataggacatttgatttgaataggcgggagtttccaattgtgcttccaaaggtagcttgtcactttttctttttctttaaattttgtaccatgccatgcattttgaacctcaactcatttcgccataaaggaatattatgtttgagaagaacgaggatactattatcttatagataacatataggtttcatta

SEQ ID NO: 471 - DNA, 200 bp, Amaranthus rudis
taatgaaacctatatgttatctataagataatagtatcctcgttcttctcaaacataatattcctttatggcgaaatgagttgaggttcaaaatgcatggcatggtacaaaatttaaagaaaaagaaaaagtgacaagctacctttggaagcacaattggaaactcccgcctattcaaatcaaatgtcctatttgataat

SEQ ID NO: 472 - DNA, 200 bp, Amaranthus rudis
tatagataacatataggtttcattatcaatgattgtttgattttcaactcttcttttcctttcatgctcatattgatgttatttctatttgttatgaattatgtccattgtgttaatgtctttctttattgtagatgcaccatacatttccagaagtatggaatattgaaaaaaggtatgaaccttaaagctttaatttt

SEQ ID NO: 473 - DNA, 200 bp, Amaranthus rudis
aaaattaaagctttaaggttcataccttttttcaatattccatacttctggaaatgtatggtgcatctacaataaagaaagacattaacacaatggacataattcataacaaatagaaataacatcaatatgagcatgaaaggaaaagaagagttgaaaatcaaacaatcattgataatgaaacctatatgttatctata

SEQ ID NO: 474 - DNA, 200 bp, Amaranthus rudis
gtatgaaccttaaagctttaattttcttcgaacttaatgtttcttaattgattcttttggatcaatttccataagaatggaaatttaaaaaagggtatgaaccttaaagatttcttcgaacttatatgttttgtaattcatgcttttagatgctgcaccattttatctatgtgtcttaagtttgttgtaatcatttgtag

SEQ ID NO: 475 - DNA, 200 bp, Amaranthus rudis
ctacaaatgattacaacaaacttaagacacatagataaaatggtgcagcatctaaaagcatgaattacaaaacatataagttcgaagaaatctttaaggttcatacccttttttaaatttccattcttatggaaattgatccaaaagaatcaattaagaaacattaagttcgaagaaaattaaagctttaaggttcatac

SEQ ID NO: 476 - DNA, 200 bp, Amaranthus rudis
ttaagtttgttgtaatcatttgtagaccaaaagaatgaatggtctggtttgaaatggttcatcgtgcaaaaatgcgattttgcttgtgattgaggtaacattcaaggtggtgtgtttgtcgtactgtcaaatgtcttcctataccatgtgatatatatataagcctaaaatgatatattgtacacctttaggatgtggat

SEQ ID NO: 477 - DNA, 200 bp, Amaranthus rudis
atccacatcctaaaggtgtacaatatatcattttaggcttatatatatatcacatggtataggaagacatttgacagtacgacaaacacaccaccttgaatgttacctcaatcacaagcaaaatcgcatttttgcacgatgaaccatttcaaaccagaccattcattcttttggtctacaaatgattacaacaaacttaa

SEQ ID NO: 478 - DNA, 200 bp, Amaranthus rudis
tattgtacacctttaggatgtggatagcaggggttcagtacatatgaaaaatccttgcaatttgatctgtacgatcaatgtgattttgccttttgccttttgccttttgttatatgatgatgattccatgtgaaattttgggatttagaaaattcacttgtttaagaacatttgaatcaaactttcaccaatttcaacca

SEQ ID NO: 479 - DNA, 200 bp, Amaranthus rudis
tggttgaaattggtgaaagtttgattcaaatgttcttaaacaagtgaattttctaaatcccaaaatttcacatggaatcatcatcatataacaaaaggcaaaaggcaaaaggcaaaatcacattgatcgtacagatcaaattgcaaggatttttcatatgtactgaacccctgctatccacatcctaaaggtgtacaata

SEQ ID NO: 480 - DNA, 200 bp, Amaranthus rudis
atcaaactttcaccaatttcaaccacatttaattgcggcaaagccgaactttaaaagtcactcccaatctttgagatatccaaactccaaaacttctattagctttcatgttttcaccaagtaaagttggtgcgactccttaccattttctttattatgcatttcgttgatgtataatagtatagattggtgctctcttt

SEQ ID NO: 481 - DNA, 200 bp, Amaranthus rudis
aaagagagcaccaatctatactattatacatcaacgaaatgcataataaagaaaatggtaaggagtcgcaccaactttacttggtgaaaacatgaaagctaatagaagttttggagtttggatatctcaaagattgggagtgacttttaaagttcggctttgccgcaattaaatgtggttgaaattggtgaaagtttgat

SEQ ID NO: 482 - DNA, 200 bp, Amaranthus rudis
aatagtatagattggtgctctctttgctctccttccaacatgcataacttctagttcttgtcgttttcttttcctccctatttttatttgacttgtagctatttttgttcactcttctcgcccaatccatagctaaagaaacttgatttcattgattttgtaactgatatgcaattcatttttgtttgcttttagttgtt

SEQ ID NO: 483 - DNA, 200 bp, Amaranthus rudis
aacaactaaaagcaaacaaaaatgaattgcatatcagttacaaaatcaatgaaatcaagtttctttagctatggattgggcgagaagagtgaacaaaaatagctacaagtcaaataaaaatagggaggaaaagaaaacgacaagaactagaagttatgcatgttggaaggagagcaaagagagcaccaatctatactatt

SEQ ID NO: 484 - DNA, 200 bp, Amaranthus rudis
tcatttttgtttgcttttagttgttgattcaaaaacaataatgctaaagccctaatcctaacatgtcgggttagctgttgaaacaatacttgaaattgctataaaaagggattttttttcgggtacttcagttgttgagattgatatggtcaagtataatttgttttaacacaatttgtaatgatttaatggcttagttt

SEQ ID NO: 485 - DNA, 200 bp, Amaranthus rudis
aaactaagccattaaatcattacaaattgtgttaaaacaaattatacttgaccatatcaatctcaacaactgaagtacccgaaaaaaaatccctttttatagcaatttcaagtattgtttcaacagctaacccgacatgttaggattagggctttagcattattgtttttgaatcaacaactaaaagcaaacaaaaatga

SEQ ID NO: 486 - DNA, 200 bp, Amaranthus rudis
ttgtaatgatttaatggcttagtttcatagctgtttgtattaataaaggaaggaggactatctgaaattgcaataggaaagagattttagttcggtatttggttgtttaaattgatatggccaagtaatgttcattttacacaattggtaatgttttattggctcaatagtgtttgtaagtatgcgactcaaatttaatc

SEQ ID NO: 487 - DNA, 200 bp, Amaranthus rudis
gattaaatttgagtcgcatacttacaaacactattgagccaataaaacattaccaattgtgtaaaatgaacattacttggccatatcaatttaaacaaccaaataccgaactaaaatctctttcctattgcaatttcagatagtcctccttcctttattaatacaaacagctatgaaactaagccattaaatcattacaa

SEQ ID NO: 488 - DNA, 200 bp, Amaranthus rudis
gtaagtatgcgactcaaatttaatcaagtataacttattgaaacataaataaatatccattaggtttggctctgtgtttgctggactaattcaatcaacattgttatctaagaaggaaaagggtggagaaaatgcttctattaagaagcctcgtgtacgtggttcattttcatttcaaggtggaatgcaggtataaactt

SEQ ID NO: 489 - DNA, 200 bp, Amaranthus rudis
aagtttatacctgcattccaccttgaaatgaaaatgaaccacgtacacgaggcttcttaatagaagcattttctccacccttttccttcttagataacaatgttgattgaattagtccagcaaacacagagccaaacctaatggatatttatttatgtttcaataagttatacttgattaaatttgagtcgcatacttac

SEQ ID NO: 490 - DNA, 200 bp, Amaranthus rudis
caaggtggaatgcaggtataaacttgtagccataatttcactttttataccttatacttccaaaatatattgatgcgtttttcttgctacaaagtacaaacacaaaagctttgggaataattctcaattttgtcaaatctactaaaaatattctattaggaatcaaggtttctattttagaatatatggatgaagacatg

SEQ ID NO: 491 - DNA, 200 bp, Amaranthus rudis
catgtcttcatccatatattctaaaatagaaaccttgattcctaatagaatatttttagtagatttgacaaaattgagaattattcccaaagcttttgtgtttgtactttgtagcaagaaaaacgcatcaatatattttggaagtataaggtataaaaagtgaaattatggctacaagtttatacctgcattccaccttg

SEQ ID NO: 492 - DNA, 200 bp, Amaranthus rudis
tttagaatatatggatgaagacatgtagaagtgtgaataaaaaaacctagatgtgaaaggtttttagtctattaaacaagaatattagaattcagagtcgtttcatcaataaaatattgttgaagaggagcaattacattctgcttcaagcaaaggcaatcttaagaggaccctaaaacttgaggaggtatgagaactta

SEQ ID NO: 493 - DNA, 200 bp, Amaranthus rudis
taagttctcatacctcctcaagttttagggtcctcttaagattgcctttgcttgaagcagaatgtaattgctcctcttcaacaatattttattgatgaaacgactctgaattctaatattcttgtttaatagactaaaaacctttcacatctaggtttttttattcacacttctacatgtcttcatccatatattctaaa

SEQ ID NO: 494 - DNA, 200 bp, Amaranthus rudis
aaacttgaggaggtatgagaacttagaggccaaagaaattaaatttgatgaagagatttggtgagataccttgcttacaaaaatgattaattttccccttagacacctcaaattatgacatttataagttctccatgcgtattcgacaagatgttacatcctatattctaaattaagtatgaaatttgtatatgtgtaag

SEQ ID NO: 495 - DNA, 200 bp, Amaranthus rudis
cttacacatatacaaatttcatacttaatttagaatataggatgtaacatcttgtcgaatacgcatggagaacttataaatgtcataatttgaggtgtctaaggggaaaattaatcatttttgtaagcaaggtatctcaccaaatctcttcatcaaatttaatttctttggcctctaagttctcatacctcctcaagttt

SEQ ID NO: 496 - DNA, 200 bp, Amaranthus rudis
agtatgaaatttgtatatgtgtaagaaagaaaagttagtcccttgaattccatgtctacgacctcaaagtgttcataccattgaaattagcgagcttacgattgttaagaaaggatcaacttgtcatcattgatcattgatgaagtgtgtaatagacatactaggtgaaattcaaaagggatctactcagtctttgagtt

SEQ ID NO: 497 - DNA, 200 bp, Amaranthus rudis
aactcaaagactgagtagatcccttttgaatttcacctagtatgtctattacacacttcatcaatgatcaatgatgacaagttgatcctttcttaacaatcgtaagctcgctaatttcaatggtatgaacactttgaggtcgtagacatggaattcaagggactaacttttctttcttacacatatacaaatttcatact

SEQ ID NO: 498 - DNA, 200 bp, Amaranthus rudis
aagggatctactcagtctttgagtttaccgtttgcttctagtattttgctatttataggcactatcaaagggttcaatattgttttttctgaacattgttgccgaattgtgaagggagaatgatggtagatttctcttatttttatgagaaaattctctttataaagagttcgatagctcaaaaatgaaagcttattgcc

SEQ ID NO: 499 - DNA, 200 bp, Amaranthus rudis
ggcaataagctttcatttttgagctatcgaactctttataaagagaattttctcataaaaataagagaaatctaccatcattctcccttcacaattcggcaacaatgttcagaaaaaacaatattgaaccctttgatagtgcctataaatagcaaaatactagaagcaaacggtaaactcaaagactgagtagatccctt

SEQ ID NO: 500 - DNA, 200 bp, Amaranthus rudis
agctcaaaaatgaaagcttattgccaaaagtggatggggtagatgaaggagaaatgcaatcaattttggtaggcttgactttgagtaaagaatttgtggaataaggtagaaaaataggatttggctgcatgatattgaaaccttttgctacttttctttttgttttggttgcaatgcacagaaaggcaggacggtaaagt

SEQ ID NO: 501 - DNA, 200 bp, Amaranthus rudis
actttaccgtcctgcctttctgtgcattgcaaccaaaacaaaaagaaaagtagcaaaaggtttcaatatcatgcagccaaatcctatttttctaccttattccacaaattctttactcaaagtcaagcctaccaaaattgattgcatttctccttcatctaccccatccacttttggcaataagctttcatttttgagct

SEQ ID NO: 502 - DNA, 200 bp, Amaranthus rudis
gcacagaaaggcaggacggtaaagtgtgataaaatggatgggaaaaattgctagaatagaatagaagaaaaataatggcaggatgtatcctttgttaccctagtttcgacaactgtgttacgtcggtattatcggtggcttggactgagtcatcatagaaattcttctctgatatagtttagatgaaatttttaaaattt

SEQ ID NO: 503 - DNA, 200 bp, Amaranthus rudis
aaattttaaaaatttcatctaaactatatcagagaagaatttctatgatgactcagtccaagccaccgataataccgacgtaacacagttgtcgaaactagggtaacaaaggatacatcctgccattatttttcttctattctattctagcaatttttcccatccattttatcacactttaccgtcctgcctttctgtgc

SEQ ID NO: 504 - DNA, 200 bp, Amaranthus rudis
agtttagatgaaatttttaaaatttaagcaggcctgaattttgataaagatagcatgatctaaagaaggcagctctaataaatcaacataaaatttgatattaagtagtctctgtctaggcctgctttccgagctagtatattaactgagtacatgttattagagcaatagcataggagtcatgtttttgcatactgatt

SEQ ID NO: 505 - DNA, 200 bp, Amaranthus rudis
aatcagtatgcaaaaacatgactcctatgctattgctctaataacatgtactcagttaatatactagctcggaaagcaggcctagacagagactacttaatatcaaattttatgttgatttattagagctgccttctttagatcatgctatctttatcaaaattcaggcctgcttaaattttaaaaatttcatctaaact

SEQ ID NO: 506 - DNA, 200 bp, Amaranthus rudis
ggagtcatgtttttgcatactgattagcatgtcaattttattccatttgctgagtactgtatgttctgcagacacttgttgacacaatgtgcaaacagcttggtgaagatgaactcaaactccagtgtgaggtgctgtccttgtcatataaccagaaggggatcccctcattagggaattggtcagtctcttctatgtca

SEQ ID NO: 507 - DNA, 200 bp, Amaranthus rudis
tgacatagaagagactgaccaattccctaatgaggggatccccttctggttatatgacaaggacagcacctcacactggagtttgagttcatcttcaccaagctgtttgcacattgtgtcaacaagtgtctgcagaacatacagtactcagcaaatggaataaaattgacatgctaatcagtatgcaaaaacatgactcc

SEQ ID NO: 508 - DNA, 200 bp, Amaranthus rudis
gaattggtcagtctcttctatgtcaaataataccagtgaagatcaatcttatgatgctgtggttgtcactgtgagtttttgtctacttttgtctctatgagcatgcaattcctttcacagccgttgagttagcaattatattccagtttgaaacttaaagttttttgggggaatttttctagcattcaagtcaatcaagg

SEQ ID NO: 509 - DNA, 200 bp, Amaranthus rudis
ccttgattgacttgaatgctagaaaaattcccccaaaaaactttaagtttcaaactggaatataattgctaactcaacggctgtgaaaggaattgcatgctcatagagacaaaagtagacaaaaactcacagtgacaaccacagcatcataagattgatcttcactggtattatttgacatagaagagactgaccaattc

SEQ ID NO: 510 - DNA, 200 bp, Amaranthus rudis
tttctagcattcaagtcaatcaaggcttatttggaactcaaagctttatctatgttatatgaaactacaataaaatgatttctaaaaaattaattgcgaatagcggagattcaattagggtgtataattgatccacatcaaatagcatgcattctacatgttagtcacttgtggcttctctagtcctctgtctccagaaa

SEQ ID NO: 511 - DNA, 200 bp, Amaranthus rudis
tttctggagacagaggactagagaagccacaagtgactaacatgtagaatgcatgctatttgatgtggatcaattatacaccctaattgaatctccgctattcgcaattaattttttagaaatcattttattgtagtttcatataacatagataaagctttgagttccaaataagccttgattgacttgaatgctagaaa

SEQ ID NO: 512 - DNA, 200 bp, Amaranthus rudis
ttctctagtcctctgtctccagaaaaagcctgcatacaaaggctcatgaagactagtatgctatatactttccgaaatgtcagcattaagtaacttgtgttgaggaaatatgtaaatcgtaccctgttaccctctttttaaagagtgattttttttttaattgaatgtggttatagctatctggtttgatgaagatttac

SEQ ID NO: 513 - DNA, 200 bp, Amaranthus rudis
gtaaatcttcatcaaaccagatagctataaccacattcaattaaaaaaaaaatcactctttaaaaagagggtaacagggtacgatttacatatttcctcaacacaagttacttaatgctgacatttcggaaagtatatagcatactagtcttcatgagcctttgtatgcaggctttttctggagacagaggactagagaa

SEQ ID NO: 514 - DNA, 200 bp, Amaranthus rudis
gctatctggtttgatgaagatttaccattcttaatgaagcaaaaaattttaagttcacaagtttcaattatattaggcatttaggctgctatacagtgaattggctcgataaattttgcgcatgtcttatttatgtgaattgtagataacgtttgctacaaagggtcaatcaagaacaaccttttcatttttgtaaggat

SEQ ID NO: 515 - DNA, 200 bp, Amaranthus rudis
atccttacaaaaatgaaaaggttgttcttgattgaccctttgtagcaaacgttatctacaattcacataaataagacatgcgcaaaatttatcgagccaattcactgtatagcagcctaaatgcctaatataattgaaacttgtgaacttaaaattttttgcttcattaagaatggtaaatcttcatcaaaccagatagc

SEQ ID NO: 516 - DNA, 200 bp, Amaranthus rudis
acaaccttttcatttttgtaaggataactcctaaattctgcctaggttggaggatatgtggaagtcacttaatggcaataggactgaaatattgttgaatatggttatctagtaccaattcacacttgtatacatgagtacatgtctaatgctctttgttgtgatttacttaaacaagaattatgttcattagcaggctt

SEQ ID NO: 517 - DNA, 200 bp, Amaranthus rudis
aagcctgctaatgaacataattcttgtttaagtaaatcacaacaaagagcattagacatgtactcatgtatacaagtgtgaattggtactagataaccatattcaacaatatttcagtcctattgccattaagtgacttccacatatcctccaacctaggcagaatttaggagttatccttacaaaaatgaaaaggttgt

SEQ ID NO: 518 - DNA, 200 bp, Amaranthus rudis
aagaattatgttcattagcaggctttcatgctctctgtacagcaccttatctttcctttaccacgatactatttgtcttgtttaattatacatatatcataaatgtttcgacattcggtctaaaatattttggatgggtgtatactgtttaatgcaacaatatgtaaaatagatacataaagaaaagtaaaaggaataat

SEQ ID NO: 519 - DNA, 200 bp, Amaranthus rudis
attattccttttacttttctttatgtatctattttacatattgttgcattaaacagtatacacccatccaaaatattttagaccgaatgtcgaaacatttatgatatatgtataattaaacaagacaaatagtatcgtggtaaaggaaagataaggtgctgtacagagagcatgaaagcctgctaatgaacataattctt

SEQ ID NO: 520 - DNA, 200 bp, Amaranthus rudis
cataaagaaaagtaaaaggaataatgaattacaaaaaatacgatgaaaattgaaaatggatgttgtatttcaaaaggaggttaaaggagtgatttgcttccaaagtagaaatcattccgagttcgtagattgttttaagaataccgagtgtagtatggattatggtggacaaaattttctataatattttttcataaaca

SEQ ID NO: 521 - DNA, 200 bp, Amaranthus rudis
tgtttatgaaaaaatattatagaaaattttgtccaccataatccatactacactcggtattcttaaaacaatctacgaactcggaatgatttctactttggaagcaaatcactcctttaacctccttttgaaatacaacatccattttcaattttcatcgtattttttgtaattcattattccttttacttttctttatg

SEQ ID NO: 522 - DNA, 200 bp, Amaranthus rudis
gagagagtgcgagagagatgagtgcgatggcgttatcgagcagcattctacaatgtccgccgcactccgacatctcgttccgcttttttgctcatacacgaacccaatcccccatcttcttcggaagaccacgaaaattatcatatatccattgttccacaagctcaagctcaactgccaattaccagaacaccattacg

SEQ ID NO: 523 - DNA, 200 bp, Amaranthus rudis
cgtaatggtgttctggtaattggcagttgagcttgagcttgtggaacaatggatatatgataattttcgtggtcttccgaagaagatgggggattgggttcgtgtatgagcaaaaaagcggaacgagatgtcggagtgcggcggacattgtagaatgctgctcgataacgccatcgcactcatctctctcgcactctctc

SEQ ID NO: 524 - DNA, 200 bp, Amaranthus rudis
tgccaattaccagaacaccattacgagccaaggagaaggagataaagtattagattgtgtaattgttggagctggtatcagtggactttgcattgctcaggctctttctaccaaacacattcaatccaatctcaatttcattgtcactgaagctaaacatcgtgttggaggtaatatcactaccatggagtccgatggct

SEQ ID NO: 525 - DNA, 200 bp, Amaranthus rudis
agccatcggactccatggtagtgatattacctccaacacgatgtttagcttcagtgacaatgaaattgagattggattgaatgtgtttggtagaaagagcctgagcaatgcaaagtccactgataccagctccaacaattacacaatctaatactttatctccttctccttggctcgtaatggtgttctggtaattggca

SEQ ID NO: 526 - DNA, 200 bp, Amaranthus rudis
atcactaccatggagtccgatggctatatctgggaagagggtcctaatagtttccaaccctccgatcctgtgcttactatggcggttgacagtggattgaaagacgatttggtcttgggagatcctaatgcccctcgtttcgtgctctggaatggtaaattaaggcctgttccttccaaacctacggaccttcccttttt

SEQ ID NO: 527 - DNA, 200 bp, Amaranthus rudis
aaaaagggaaggtccgtaggtttggaaggaacaggccttaatttaccattccagagcacgaaacgaggggcattaggatctcccaagaccaaatcgtctttcaatccactgtcaaccgccatagtaagcacaggatcggagggttggaaactattaggaccctcttcccagatatagccatcggactccatggtagtgat

SEQ ID NO: 528 - DNA, 200 bp, Amaranthus rudis
ccaaacctacggaccttcccttttttgatctcatgagctttcctggtaagattagggctggtcttggtgcacttggtcttcgtcctcctcctcctcctccttcttatgaggaatctgttgaagaatttgtgcgccgtaatctcggcgatgaggtcttcgaacgcttgatcgaacccttttgttctggtgtctatgctggt

SEQ ID NO: 529 - DNA, 200 bp, Amaranthus rudis
accagcatagacaccagaacaaaagggttcgatcaagcgttcgaagacctcatcgccgagattacggcgcacaaattcttcaacagattcctcataagaaggaggaggaggaggaggacgaagaccaagtgcaccaagaccagccctaatcttaccaggaaagctcatgagatcaaaaaagggaaggtccgtaggtttgg

SEQ ID NO: 530 - DNA, 200 bp, Amaranthus rudis
cttttgttctggtgtctatgctggtgatcctgcaaagttgagtatgaaagctgcatttggaaaggtctggaccttagagcaaaagggtggtagtatcatcgccggtacactcaaaactattcaggaaaggaagaataatcctccaccccctcgagacccccgccttcctaaacctaagggccagactgttggatccttta

SEQ ID NO: 531 - DNA, 200 bp, Amaranthus rudis
taaaggatccaacagtctggcccttaggtttaggaaggcgggggtctcgagggggtggaggattattcttcctttcctgaatagttttgagtgtaccggcgatgatactaccacccttttgctctaaggtccagacctttccaaatgcagctttcatactcaactttgcaggatcaccagcatagacaccagaacaaaag

SEQ ID NO: 532 - DNA, 200 bp, Amaranthus rudis
aagggccagactgttggatcctttaggaaagggctcattatgttacctaccgccattgctgctaggcttggcagtaaagtcaaactatcgtggacactttctaatattgataagtcgctcaatggtgaatacattctcacttatcaaacacccgatggaccggtttctgttaggaccaaagcggttgtcatgactgtccc

SEQ ID NO: 533 - DNA, 200 bp, Amaranthus rudis
gggacagtcatgacaaccgctttggtcctaacagaaaccggtccatcgggtgtttgataagtgagaatgtattcaccattgagcgacttatcaatattagaaagtgtccacgatagtttgactttactgccaagcctagcagcaatggcggtaggtaacataatgagccctttcctaaaggatccaacagtctggccctt

SEQ ID NO: 534 - DNA, 200 bp, Amaranthus rudis
gcgagagagatgagtgcgatggcgttatcgagcagcattctacaatgtccgccgcactccgacatctcgttccgcttttttgctcatacacgaacccaatcccccatcttcttcggaagaccacgaaaattatcatatatccattgttccacaagctcaagctcaactgccaattaccagaacaccattacgagccaagg

SEQ ID NO: 535 - DNA, 200 bp, Amaranthus rudis
ccttggctcgtaatggtgttctggtaattggcagttgagcttgagcttgtggaacaatggatatatgataattttcgtggtcttccgaagaagatgggggattgggttcgtgtatgagcaaaaaagcggaacgagatgtcggagtgcggcggacattgtagaatgctgctcgataacgccatcgcactcatctctctcgc

SEQ ID NO: 536 - DNA, 200 bp, Amaranthus rudis
accagaacaccattacgagccaaggagaaggagataaagtattagattgtgtaattgttggagctggtatcagtggactttgcattgctcaggctctttctaccaaacacattcaatccaatctcaatttcattgtcactgaagctaaacatcgtgttggaggtaatatcactaccatggagtccgatggctatatctgg

SEQ ID NO: 537 - DNA, 200 bp, Amaranthus rudis
ccagatatagccatcggactccatggtagtgatattacctccaacacgatgtttagcttcagtgacaatgaaattgagattggattgaatgtgtttggtagaaagagcctgagcaatgcaaagtccactgataccagctccaacaattacacaatctaatactttatctccttctccttggctcgtaatggtgttctggt

SEQ ID NO: 538 - DNA, 200 bp, Amaranthus rudis
catggagtccgatggctatatctgggaagagggtcctaatagtttccaaccctccgatcctgtgcttactatggcggttgacagtggattgaaagacgatttggtcttgggagatcctaatgcccctcgtttcgtgctctggaatggtaaattaaggcctgttccttccaaacctacggaccttcccttttttgatctca

SEQ ID NO: 539 - DNA, 200 bp, Amaranthus rudis
tgagatcaaaaaagggaaggtccgtaggtttggaaggaacaggccttaatttaccattccagagcacgaaacgaggggcattaggatctcccaagaccaaatcgtctttcaatccactgtcaaccgccatagtaagcacaggatcggagggttggaaactattaggaccctcttcccagatatagccatcggactccatg

SEQ ID NO: 540 - DNA, 200 bp, Amaranthus rudis
acggaccttcccttttttgatctcatgagctttcctggtaagattagggctggtcttggtgcacttggtcttcgtcctcctcctcctcctccttcttatgaggaatctgttgaagaatttgtgcgccgtaatctcggcgatgaggtcttcgaacgcttgatcgaacccttttgttctggtgtctatgctggtgatcctgc

SEQ ID NO: 541 - DNA, 200 bp, Amaranthus rudis
gcaggatcaccagcatagacaccagaacaaaagggttcgatcaagcgttcgaagacctcatcgccgagattacggcgcacaaattcttcaacagattcctcataagaaggaggaggaggaggaggacgaagaccaagtgcaccaagaccagccctaatcttaccaggaaagctcatgagatcaaaaaagggaaggtccgt

SEQ ID NO: 542 - DNA, 200 bp, Amaranthus rudis
ctggtgtctatgctggtgatcctgcaaagttgagtatgaaagctgcatttggaaaggtctggaccttagagcaaaagggtggtagtatcatagccggtacactcaaaactattcaggaaaggaaaaataatcctctaccccctcgagacccccgccttcctaaacctaagggccagactgttggatcctttaggaaaggg

SEQ ID NO: 543 - DNA, 200 bp, Amaranthus rudis
ccctttcctaaaggatccaacagtctggcccttaggtttaggaaggcgggggtctcgagggggtagaggattatttttcctttcctgaatagttttgagtgtaccggctatgatactaccacccttttgctctaaggtccagacctttccaaatgcagctttcatactcaactttgcaggatcaccagcatagacaccag

SEQ ID NO: 544 - DNA, 200 bp, Amaranthus rudis
gactgttggatcctttaggaaagggctcattatgttacctaccgccattgctgctaggcttggcagtaaagtcaaactatcgtggacactttctaatattgataagtcgctcaatggagaatacaatctcacttatcaaacacccgatggaccggtttctgttaggaccaaagcggttgtcatgaccgtcccttcgtaca

SEQ ID NO: 545 - DNA, 200 bp, Amaranthus rudis
tgtacgaagggacggtcatgacaaccgctttggtcctaacagaaaccggtccatcgggtgtttgataagtgagattgtattctccattgagcgacttatcaatattagaaagtgtccacgatagtttgactttactgccaagcctagcagcaatggcggtaggtaacataatgagccctttcctaaaggatccaacagtc

SEQ ID NO: 546 - DNA, 200 bp, Amaranthus rudis
gttgtcatgaccgtcccttcgtacattgcaagtagcttgcttcgtccgctctcagatgttgctgcagattctctttctaaattttactatccaccagtcgcagcagtgtccctttcttatcccaaagaagcaattagaccagaatgcttgattgatggagaactaaaaggattcgggcaattgcatccccgcagccaggg

SEQ ID NO: 547 - DNA, 200 bp, Amaranthus rudis
ccctggctgcggggatgcaattgcccgaatccttttagttctccatcaatcaagcattctggtctaattgcttctttgggataagaaagggacactgctgcgactggtggatagtaaaatttagaaagagaatctgcagcaacatctgagagcggacgaagcaagctacttgcaatgtacgaagggacggtcatgacaac

SEQ ID NO: 548 - DNA, 200 bp, Amaranthus rudis
ggcaattgcatccccgcagccagggtgtggaaaccttgggtacaatttatagttcatctcttttccctggtcgagcaccacccggtaggaccttgatcttgagctacattggaggtgctacaaatcttggcatattacaaaagagtgaagatgaacttgcggagacagttgataaggatctcagaaaaattctgataaat

SEQ ID NO: 549 - DNA, 200 bp, Amaranthus rudis
atttatcagaatttttctgagatccttatcaactgtctccgcaagttcatcttcactcttttgtaatatgccaagatttgtagcacctccaatgtagctcaagatcaaggtcctaccgggtggtgctcgaccagggaaaagagatgaactataaattgtacccaaggtttccacaccctggctgcggggatgcaattgcc

SEQ ID NO: 550 - DNA, 200 bp, Amaranthus rudis
ggatctcagaaaaattctgataaatccaaatgcgaaaggcagccgtgttctgggagtgagagtatggccaaaggcaatcccccaatttttagttggtcactttgatgtgctagatgctgcaaaagctggtttggcaaatgctgggctaaaggggttgtttcttggtggtaattatgtatcaggtgttgccttggggaggt

SEQ ID NO: 551 - DNA, 200 bp, Amaranthus rudis
acctccccaaggcaacacctgatacataattaccaccaagaaacaacccctttagcccagcatttgccaaaccagcttttgcagcatctagcacatcaaagtgaccaactaaaaattgggggattgcctttggccatactctcactcccagaacacggctgcctttcgcatttggatttatcagaatttttctgagatcc

SEQ ID NO: 552 - DNA, 200 bp, Amaranthus rudis
gtatcaggtgttgccttggggaggtgtatagagggtgcttatgactctgcttctgaggtagtggatttcctctcacagtacaaagataagtagtcaatagggctccagcatcttggttaagtaactttttgtagctgttgtaatttggaaagatgtaaaatagcccacactcaaacaagtttggaaagatgtaaaagcat

SEQ ID NO: 553 - DNA, 200 bp, Amaranthus rudis
atgcttttacatctttccaaacttgtttgagtgtgggctattttacatctttccaaattacaacagctacaaaaagttacttaaccaagatgctggagccctattgactacttatctttgtactgtgagaggaaatccactacctcagaagcagagtcataagcaccctctatacacctccccaaggcaacacctgatac

SEQ ID NO: 554 - DNA, 200 bp, Amaranthus rudis
ggccagggtgtggaaaccttgggaacaatttatagttcatctcttttccctggtcgagcaccacccggtaggaccttgatcttgagctacattggaggtgctacaaatcttggcatattacaaaagagtgaagatgaacttgcggagacagttgataaggatctcagaaaaattctgataaatccaaatgcgaaaggcag

SEQ ID NO: 555 - DNA, 200 bp, Amaranthus rudis
ctgcctttcgcatttggatttatcagaatttttctgagatccttatcaactgtctccgcaagttcatcttcactcttttgtaatatgccaagatttgtagcacctccaatgtagctcaagatcaaggtcctaccgggtggtgctcgaccagggaaaagagatgaactataaattgttcccaaggtttccacaccctggcc

SEQ ID NO: 556 - DNA, 200 bp, Amaranthus rudis
tgataaatccaaatgcgaaaggcagccgtgttctgggagtgagagtatggccaaaggcaatcccccaatttttagttggtcactttgatgtgctagatgctgcaaaagctggtttggcaaatgctgggctaaaggggttgtttcttggtggtaattatgtatcaggtgttgccttggggaggtgtatagagggtgcttat

SEQ ID NO: 557 - DNA, 200 bp, Amaranthus rudis
ataagcaccctctatacacctccccaaggcaacacctgatacataattaccaccaagaaacaacccctttagcccagcatttgccaaaccagcttttgcagcatctagcacatcaaagtgaccaactaaaaattgggggattgcctttggccatactctcactcccagaacacggctgcctttcgcatttggatttatca

SEQ ID NO: 558 - DNA, 200 bp, Amaranthus rudis
ggggaggtgtatagagggtgcttatgactctgcttctgaggtagtggatttcctctcacagtacaaagataagtagtcaatagggctccagcatcttggttaagtaactttttgtagctgttgtaatttggaaagatgtaaaatagcccacactcaaacaagtttggaaagatgtaaaagcatgagatacagtcggtgtt

SEQ ID NO: 559 - DNA, 200 bp, Amaranthus rudis
aacaccgactgtatctcatgcttttacatctttccaaacttgtttgagtgtgggctattttacatctttccaaattacaacagctacaaaaagttacttaaccaagatgctggagccctattgactacttatctttgtactgtgagaggaaatccactacctcagaagcagagtcataagcaccctctatacacctcccc

SEQ ID NO: 560 - DNA, 200 bp, Amaranthus rudis
gtcttgggagatcctaatgcccctcgtttcgtgctctggaatggtaaattaaggcctgttccttccaaacctacggaccttcccttttttgatctcatgagctttcctggtaagattagggctggtcttggtgcacttggtcttcgtcctcctcctcctcctccttcttatgaggaatctgttgaagaatttgtgcgccg

SEQ ID NO: 561 - DNA, 200 bp, Amaranthus rudis
cggcgcacaaattcttcaacagattcctcataagaaggaggaggaggaggaggacgaagaccaagtgcaccaagaccagccctaatcttaccaggaaagctcatgagatcaaaaaagggaaggtccgtaggtttggaaggaacaggccttaatttaccattccagagcacgaaacgaggggcattaggatctcccaagac

SEQ ID NO: 562 - DNA, 200 bp, Amaranthus rudis
ggtggtagtatcatagccggtacactcaaaactattcaggaaaggaaaaataatcctccaccccctcgagacccgtccgtaatcaccattacttattgctttccatcaccttgaatcttaccttaatatacatgtatttaattgataatgtcacattgcctcatttgcagccgccttcctaaacctaagggccagactgt

SEQ ID NO: 563 - DNA, 200 bp, Amaranthus rudis
acagtctggcccttaggtttaggaaggcggctgcaaatgaggcaatgtgacattatcaattaaatacatgtatattaaggtaagattcaaggtgatggaaagcaataagtaatggtgattacggacgggtctcgagggggtggaggattatttttcctttcctgaatagttttgagtgtaccggctatgatactaccacc

SEQ ID NO: 564 - DNA, 200 bp, Amaranthus rudis
ttgatttgaagataggataaccagagagagtgcgagagagatgagtgcgatggcgttatcgagcagcattctacaatgtccgccgcactccgacatctcgttccgcttttttgctcatacacgaacccaatcccccatcttcttcggaagaccacgaaaattatcatatatccattgttccacaagctcaagctcaactg

SEQ ID NO: 565 - DNA, 200 bp, Amaranthus rudis
cagttgagcttgagcttgtggaacaatggatatatgataattttcgtggtcttccgaagaagatgggggattgggttcgtgtatgagcaaaaaagcggaacgagatgtcggagtgcggcggacattgtagaatgctgctcgataacgccatcgcactcatctctctcgcactctctctggttatcctatcttcaaatcaa

SEQ ID NO: 566 - DNA, 200 bp, Amaranthus rudis
tgttccacaagctcaagctcaactgccaattaccagaacaccattacgagccaaggagaaggagataaagtattagattgtgtaattgttggagctggtatcagtggactttgcattgctcaggctctttctaccaaacacattcaatccaatctcaatttcattgtcactgaagctaaacatcgtgttggaggtaatat

SEQ ID NO: 567 - DNA, 200 bp, Amaranthus rudis
atattacctccaacacgatgtttagcttcagtgacaatgaaattgagattggattgaatgtgtttggtagaaagagcctgagcaatgcaaagtccactgataccagctccaacaattacacaatctaatactttatctccttctccttggctcgtaatggtgttctggtaattggcagttgagcttgagcttgtggaaca

SEQ ID NO: 568 - DNA, 200 bp, Amaranthus rudis
ttttaaccaatcctcaaaatttacaccatggagatgtctgcggataagaattagtaactgtagcagctgtaattgttgcatgcagttttatggtttgccttgcaattcaaacttgggatattgtttgccttgcaatttgtagtttagtgtttgcccttcactttgtattttagttatttttttcattgcaatttgctctt

SEQ ID NO: 569 - DNA, 200 bp, Amaranthus rudis
aagagcaaattgcaatgaaaaaaataactaaaatacaaagtgaagggcaaacactaaactacaaattgcaaggcaaacaatatcccaagtttgaattgcaaggcaaaccataaaactgcatgcaacaattacagctgctacagttactaattcttatccgcagacatctccatggtgtaaattttgaggattggttaaaa

SEQ ID NO: 570 - DNA, 200 bp, Amaranthus rudis
atttttttcattgcaatttgctctttgaagtataaaatggtgacctttcttgctcaggatgttgctgcagattctctttctaaattttactatccaccagtcgcagcagtgtccctttcttatcccaaagaagcaattagaccagaatgcttgatcgatggagaactaaaaggattcgggcaattgcatccccgcagcca

SEQ ID NO: 571 - DNA, 200 bp, Amaranthus rudis
tggctgcggggatgcaattgcccgaatccttttagttctccatcgatcaagcattctggtctaattgcttctttgggataagaaagggacactgctgcgactggtggatagtaaaatttagaaagagaatctgcagcaacatcctgagcaagaaaggtcaccattttatacttcaaagagcaaattgcaatgaaaaaaat

SEQ ID NO: 572 - DNA, 200 bp, Amaranthus rudis
tcgggcaattgcatccccgcagccagggtgtggaaaccttgggtatatgctcccattcaactatatctcaataattatgagtatttttctttctctggattattcaatttggtgacgttaaattttgactgtactcgacaggaacaatttatagttcatctcttttccctggtcgagcaccacccggtaggaccttgatc

SEQ ID NO: 573 - DNA, 200 bp, Amaranthus rudis
gatcaaggtcctaccgggtggtgctcgaccagggaaaagagatgaactataaattgttcctgtcgagtacagtcaaaatttaacgtcaccaaattgaataatccagagaaagaaaaatactcataattattgagatatagttgaatgggagcatatacccaaggtttccacaccctggctgcggggatgcaattgcccga

SEQ ID NO: 574 - DNA, 200 bp, Amaranthus rudis
agcaccacccggtaggaccttgatcttgagctacattggaggtgctacaaatcttggcatattacaaaaggcaagtcatttatacaattatatgtgtccttgtatcctcaaataagtcgtatcaatcctgacgacatgcttctatcaatgcagagtgaagatgaacttgcggagacagttgataaggatctcagaaaaat

SEQ ID NO: 575 - DNA, 200 bp, Amaranthus rudis
atttttctgagatccttatcaactgtctccgcaagttcatcttcactctgcattgatagaagcatgtcgtcaggattgatacgacttatttgaggatacaaggacacatataattgtataaatgacttgccttttgtaatatgccaagatttgtagcacctccaatgtagctcaagatcaaggtcctaccgggtggtgct

SEQ ID NO: 576 - DNA, 200 bp, Amaranthus rudis
cagttgataaggatctcagaaaaattctgataaatccaaatgcgaaaggcagccgtgttctgggagtgagagtatggccaaaggcaatcccccaatttttagttggtcactttgatctgctagatgctgcaaaagctggtttggcaaatgctgggctaaaggggttgtttcttggtggtaattatgtatcaggtgttgcc

SEQ ID NO: 577 - DNA, 200 bp, Amaranthus rudis
ggcaacacctgatacataattaccaccaagaaacaacccctttagcccagcatttgccaaaccagcttttgcagcatctagcagatcaaagtgaccaactaaaaattgggggattgcctttggccatactctcactcccagaacacggctgcctttcgcatttggatttatcagaatttttctgagatccttatcaactg

SEQ ID NO: 578 - DNA, 200 bp, Amaranthus spinosus
agagagagtgcaagagagatgagtgccatggcgttatcgagcagcattctacaatgtccgccgcactccgacttctctttccgcttttctgcttatacaccaacccgctcccccttcttcttcggaagacctccaaaattatcatatatccattgttccacaagctcaagctcaactgccaattaccagaacacgattac

SEQ ID NO: 579 - DNA, 200 bp, Amaranthus spinosus
gtaatcgtgttctggtaattggcagttgagcttgagcttgtggaacaatggatatatgataattttggaggtcttccgaagaagaagggggagcgggttggtgtataagcagaaaagcggaaagagaagtcggagtgcggcggacattgtagaatgctgctcgataacgccatggcactcatctctcttgcactctctct

SEQ ID NO: 580 - DNA, 200 bp, Amaranthus spinosus
ctgccaattaccagaacacgattacgacccaaggagaaggagataaagtattggattgtgtaattgttggagctggtatcagtggactttgcattgctcaagctctttctaccaaacacattcaatccaatctcaatttcattgtcactgaagctaaaaaccgtgttggaggtaatatcactaccatggagtccgatggc

SEQ ID NO: 581 - DNA, 200 bp, Amaranthus spinosus
gccatcggactccatggtagtgatattacctccaacacggtttttagcttcagtgacaatgaaattgagattggattgaatgtgtttggtagaaagagcttgagcaatgcaaagtccactgataccagctccaacaattacacaatccaatactttatctccttctccttgggtcgtaatcgtgttctggtaattggcag

SEQ ID NO: 582 - DNA, 200 bp, Amaranthus spinosus
tatcactaccatggagtccgatggctatatctgggaagagggtcctaatagtttccaaccctccgatcctgtgcttactatggcggttgacagtggattgaaagatgatttggtcttgggagatcctaatgcccctcgtttcgtgctctggaatggtaaattaaggcctgttccttccaaacctacggaccttccctttt

SEQ ID NO: 583 - DNA, 200 bp, Amaranthus spinosus
aaaagggaaggtccgtaggtttggaaggaacaggccttaatttaccattccagagcacgaaacgaggggcattaggatctcccaagaccaaatcatctttcaatccactgtcaaccgccatagtaagcacaggatcggagggttggaaactattaggaccctcttcccagatatagccatcggactccatggtagtgata

SEQ ID NO: 584 - DNA, 200 bp, Amaranthus spinosus
tccaaacctacggaccttcccttttttgatctcatgagctttcctggtaagattagggctggtcttggtgctcttggtcttcgtcctcctcctccttcttatgaggagtctgttgaagaatttgtgcgccgtaatctcggtgatgaggttttcgaacgcttgattgaacccttttgttctggtgtgtatgctggtgatcc

SEQ ID NO: 585 - DNA, 200 bp, Amaranthus spinosus
ggatcaccagcatacacaccagaacaaaagggttcaatcaagcgttcgaaaacctcatcaccgagattacggcgcacaaattcttcaacagactcctcataagaaggaggaggaggacgaagaccaagagcaccaagaccagccctaatcttaccaggaaagctcatgagatcaaaaaagggaaggtccgtaggtttgga

SEQ ID NO: 586 - DNA, 200 bp, Amaranthus spinosus
gttctggtgtgtatgctggtgatccttcaaagttgagtatgaaagctgcatttggaaaggtctggaccttagagcaaaagggtggtagtatcatcgccggtacactcaaaactattcaggaaaggaagaataatcctccaccgcctcgagacccccgccttcctaaacctaagggccagactgttggatcctttaggaaa

SEQ ID NO: 587 - DNA, 200 bp, Amaranthus spinosus
tttcctaaaggatccaacagtctggcccttaggtttaggaaggcgggggtctcgaggcggtggaggattattcttcctttcctgaatagttttgagtgtaccggcgatgatactaccacccttttgctctaaggtccagacctttccaaatgcagctttcatactcaactttgaaggatcaccagcatacacaccagaac

SEQ ID NO: 588 - DNA, 200 bp, Amaranthus spinosus
ccagactgttggatcctttaggaaagggctcattatgttacctaccgccattgctgctaggcttggcagtaaagtcaaactatcatggacactttctaatattgataagtcgctcaatggtgaatacaatctcacttatcaaacacccgatggaccggtttctgttaggaccaaagcggttgtcatgactgtcccttcat

SEQ ID NO: 589 - DNA, 200 bp, Amaranthus spinosus
atgaagggacagtcatgacaaccgctttggtcctaacagaaaccggtccatcgggtgtttgataagtgagattgtattcaccattgagcgacttatcaatattagaaagtgtccatgatagtttgactttactgccaagcctagcagcaatggcggtaggtaacataatgagccctttcctaaaggatccaacagtctgg

SEQ ID NO: 590 - DNA, 200 bp, Amaranthus spinosus
gcggttgtcatgactgtcccttcatacattgcaagtagcctgcttcgtccgctctcagatgttgctgcagattctctttctaaattttactatccaccagtcgcagcagtgtccctttcttatcccaaagaagcaattagaccagaatgcttgatcgatggagaactaaaaggattcgggcaattgcatccccgcagcca

SEQ ID NO: 591 - DNA, 200 bp, Amaranthus spinosus
tggctgcggggatgcaattgcccgaatccttttagttctccatcgatcaagcattctggtctaattgcttctttgggataagaaagggacactgctgcgactggtggatagtaaaatttagaaagagaatctgcagcaacatctgagagcggacgaagcaggctacttgcaatgtatgaagggacagtcatgacaaccgc

SEQ ID NO: 592 - DNA, 200 bp, Amaranthus spinosus
tcgggcaattgcatccccgcagccagggtgtggaaaccttgggaacaatttatagttcatctcttttccctggtcgagcaccacccggtaggaccttgatcttgagctacattggaggtgctacaaatgttggcatattacaaaagagtgaagatgaacttgcggagacagttgacaaggatctcagaaaaattctgata

SEQ ID NO: 593 - DNA, 200 bp, Amaranthus spinosus
tatcagaatttttctgagatccttgtcaactgtctccgcaagttcatcttcactcttttgtaatatgccaacatttgtagcacctccaatgtagctcaagatcaaggtcctaccgggtggtgctcgaccagggaaaagagatgaactataaattgttcccaaggtttccacaccctggctgcggggatgcaattgcccga

SEQ ID NO: 594 - DNA, 200 bp, Amaranthus thunbergii
agagagtgcgagagaaatgagtgcgatggcgttatcgagcagcattctacaatgtccgccgcactccgacatctcgttccgcttttctgctcattcaccaacccactcccccatcttcttcggaagaccacgaaaattatcatatatccattgttccacaagctcaagctcaactgccaattaccagaacacgattacga

SEQ ID NO: 595 - DNA, 200 bp, Amaranthus thunbergii
tcgtaatcgtgttctggtaattggcagttgagcttgagcttgtggaacaatggatatatgataattttcgtggtcttccgaagaagatgggggagtgggttggtgaatgagcagaaaagcggaacgagatgtcggagtgcggcggacattgtagaatgctgctcgataacgccatcgcactcatttctctcgcactctct

SEQ ID NO: 596 - DNA, 200 bp, Amaranthus thunbergii
gccaattaccagaacacgattacgacccaaggagaaggagataaagtattagattgtgtaattgttggagctggtatcagtggactttgcattgcgcaggctctttctaccaaacacattcaatccaatctcaatttcattgtcactgaagctaaacatcgtgttggaggtaatatcactaccatggagtccgatggcta

SEQ ID NO: 597 - DNA, 200 bp, Amaranthus thunbergii
tagccatcggactccatggtagtgatattacctccaacacgatgtttagcttcagtgacaatgaaattgagattggattgaatgtgtttggtagaaagagcctgcgcaatgcaaagtccactgataccagctccaacaattacacaatctaatactttatctccttctccttgggtcgtaatcgtgttctggtaattggc

SEQ ID NO: 598 - DNA, 200 bp, Amaranthus thunbergii
tcactaccatggagtccgatggctatatctgggaagagggtcctaatagtttccaaccctctgatcctgtgcttactatggcggttgacagtggattgaaagacgatttggtcttgggagatcctaatgcccctcgtttcgtgctctggaatggtaaattaaggcctgttccttccaaacctacggaccttccctttttt

SEQ ID NO: 599 - DNA, 200 bp, Amaranthus thunbergii
aaaaaagggaaggtccgtaggtttggaaggaacaggccttaatttaccattccagagcacgaaacgaggggcattaggatctcccaagaccaaatcgtctttcaatccactgtcaaccgccatagtaagcacaggatcagagggttggaaactattaggaccctcttcccagatatagccatcggactccatggtagtga

SEQ ID NO: 600 - DNA, 200 bp, Amaranthus thunbergii
caaacctacggaccttcccttttttgatctcatgagctttcctggtaagattagggctggtcttggtgcacttggtcttcgtcgtcctcctcctccttcttcttatgaggaatctgttgaagaatttgtgcgccgtaatctcggcgatgaggtcttcgaacgcttgatcgaacccttttgttctggtgtgtatgctggtg

SEQ ID NO: 601 - DNA, 200 bp, Amaranthus thunbergii
caccagcatacacaccagaacaaaagggttcgatcaagcgttcgaagacctcatcgccgagattacggcgcacaaattcttcaacagattcctcataagaagaaggaggaggaggacgacgaagaccaagtgcaccaagaccagccctaatcttaccaggaaagctcatgagatcaaaaaagggaaggtccgtaggtttg

SEQ ID NO: 602 - DNA, 200 bp, Amaranthus thunbergii
ttttgttctggtgtgtatgctggtgatcctacaaagttgagtatgaaagctgcatttggaaaggtctggaccttagagcaaaagggtggtagtatcatcgccggtacactcaaaactattcaggaaaggaagaataatcctccaccccctcgagacccccgccttcctaaacctaagggccagactgttggatcctttag

SEQ ID NO: 603 - DNA, 200 bp, Amaranthus thunbergii
ctaaaggatccaacagtctggcccttaggtttaggaaggcgggggtctcgagggggtggaggattattcttcctttcctgaatagttttgagtgtaccggcgatgatactaccacccttttgctctaaggtccagacctttccaaatgcagctttcatactcaactttgtaggatcaccagcatacacaccagaacaaaa

SEQ ID NO: 604 - DNA, 200 bp, Amaranthus thunbergii
agggccagactgttggatcctttaggaaagggctcattatgttacctaccgccattgctgctaggcttggcagtaaagtcaaactatcgtggacactttctaatattgataagtcgctcaatggtgaatacattctcacttatcaaacacccgatggaccggtttctgttaggaccaaagcggttgtcatgactgtccct

SEQ ID NO: 605 - DNA, 200 bp, Amaranthus thunbergii
agggacagtcatgacaaccgctttggtcctaacagaaaccggtccatcgggtgtttgataagtgagaatgtattcaccattgagcgacttatcaatattagaaagtgtccacgatagtttgactttactgccaagcctagcagcaatggcggtaggtaacataatgagccctttcctaaaggatccaacagtctggccct

SEQ ID NO: 606 - DNA, 200 bp, Amaranthus thunbergii
caaagcggttgtcatgactgtcccttcatacattgcaagtagcctgcttcgtccgctctcagatgttgctgcagattctctttctaagttttactatccaccagtcgcagcagtgtccctttcttatcccaaagaagcaattagaccagaatgcttgatcgatggagaactaaaaggattcgggcaattgcatccccgca

SEQ ID NO: 607 - DNA, 200 bp, Amaranthus thunbergii
tgcggggatgcaattgcccgaatccttttagttctccatcgatcaagcattctggtctaattgcttctttgggataagaaagggacactgctgcgactggtggatagtaaaacttagaaagagaatctgcagcaacatctgagagcggacgaagcaggctacttgcaatgtatgaagggacagtcatgacaaccgctttg

SEQ ID NO: 608 - DNA, 200 bp, Amaranthus thunbergii
ggattcgggcaattgcatccccgcagccagggtgtggaaaccttgggaacaatttatagttcatctcttttccctggtcgagcaccacccggtaggaccttgatcttgagctacattggaggtgctacaaatgttggaatattacaaaagagtgaagatgaacttgcggagacagttgataaggatctcagaaaaattct

SEQ ID NO: 609 - DNA, 200 bp, Amaranthus thunbergii
agaatttttctgagatccttatcaactgtctccgcaagttcatcttcactcttttgtaatattccaacatttgtagcacctccaatgtagctcaagatcaaggtcctaccgggtggtgctcgaccagggaaaagagatgaactataaattgttcccaaggtttccacaccctggctgcggggatgcaattgcccgaatcc

SEQ ID NO: 610 - DNA, 200 bp, Amaranthus viridis
ggataaccagagagagtgcgagagaaatgagtgcgatggcgttatcgagcagcattctacaatgtccgccgcactccgacatctcgttccgcttttctgctcattcaccaacccactcccccatcttcttcggaagaccacgaaaattatcatatatccattgttccacaagctcaagctcaactgccaattaccagaac

SEQ ID NO: 611 - DNA, 200 bp, Amaranthus viridis
gttctggtaattggcagttgagcttgagcttgtggaacaatggatatatgataattttcgtggtcttccgaagaagatgggggagtgggttggtgaatgagcagaaaagcggaacgagatgtcggagtgcggcggacattgtagaatgctgctcgataacgccatcgcactcatttctctcgcactctctctggttatcc

SEQ ID NO: 612 - DNA, 200 bp, Amaranthus viridis
aagctcaactgccaattaccagaacacgattacgacccaaggagaaggagataaagtattagattgtgtaattgttggagctggtatcagtggactttgcattgcgcaggctctttctaccaaacacattcaatccaatctcaatttcattgtcactgaagctaaacatcgtgttggaggtaatattactaccatggagt

SEQ ID NO: 613 - DNA, 200 bp, Amaranthus viridis
actccatggtagtaatattacctccaacacgatgtttagcttcagtgacaatgaaattgagattggattgaatgtgtttggtagaaagagcctgcgcaatgcaaagtccactgataccagctccaacaattacacaatctaatactttatctccttctccttgggtcgtaatcgtgttctggtaattggcagttgagctt

SEQ ID NO: 614 - DNA, 200 bp, Amaranthus viridis
ggaggtaatattactaccatggagtccgatggctatatctgggaagagggtcctaatagtttccaaccctctgatcctgtgcttactatggcggttgacagtggattgaaagacgatttggtcttgggagatcctaatgcccctcgtttcgtgctctggaatggtaaattaaggcctgttccttccaaacctacggacct

SEQ ID NO: 615 - DNA, 200 bp, Amaranthus viridis
aggtccgtaggtttggaaggaacaggccttaatttaccattccagagcacgaaacgaggggcattaggatctcccaagaccaaatcgtctttcaatccactgtcaaccgccatagtaagcacaggatcagagggttggaaactattaggaccctcttcccagatatagccatcggactccatggtagtaatattacctcc

SEQ ID NO: 616 - DNA, 200 bp, Amaranthus viridis
ctgttccttccaaacctacggaccttcccttttttgatctcatgagctttcctggtaagattagggctggtcttggtgcacttggtcttcgtcgtcctcctcctccttcttcttatgaggaatctgttgaagaatttgtgcgccgtaatctcggcgatgaggtcttcgaacgcttgatcgaacccttttgttctggtgtg

SEQ ID NO: 617 - DNA, 200 bp, Amaranthus viridis
cacaccagaacaaaagggttcgatcaagcgttcgaagacctcatcgccgagattacggcgcacaaattcttcaacagattcctcataagaagaaggaggaggaggacgacgaagaccaagtgcaccaagaccagccctaatcttaccaggaaagctcatgagatcaaaaaagggaaggtccgtaggtttggaaggaacag

SEQ ID NO: 618 - DNA, 200 bp, Amaranthus viridis
gatcgaacccttttgttctggtgtgtatgctggtgatcctacaaagttgagtatgaaagctgcatttggaaaggtctggaccttagagcaaaagggtggtagtatcatcgccggtacactcaaaactattcaggaaaggaagaataatcctccaccccctcgagacccccgccttcctaaacctaagggccagactgttg

SEQ ID NO: 619 - DNA, 200 bp, Amaranthus viridis
caacagtctggcccttaggtttaggaaggcgggggtctcgagggggtggaggattattcttcctttcctgaatagttttgagtgtaccggcgatgatactaccacccttttgctctaaggtccagacctttccaaatgcagctttcatactcaactttgtaggatcaccagcatacacaccagaacaaaagggttcgatc

SEQ ID NO: 620 - DNA, 200 bp, Amaranthus viridis
cctaaacctaagggccagactgttggatcctttaggaaagggctcattatgttacctaccgccattgctgctaggcttggcagtaaagtcaaactatcgtggacactttctaatattgataagtcgctcaatggtgaatacaatctcacttatcaaacacccgatggaccggtttctgttaggaccaaagcggttgtcat

SEQ ID NO: 621 - DNA, 200 bp, Amaranthus viridis
atgacaaccgctttggtcctaacagaaaccggtccatcgggtgtttgataagtgagattgtattcaccattgagcgacttatcaatattagaaagtgtccacgatagtttgactttactgccaagcctagcagcaatggcggtaggtaacataatgagccctttcctaaaggatccaacagtctggcccttaggtttagg

SEQ ID NO: 622 - DNA, 200 bp, Amaranthus viridis
ctgttaggaccaaagcggttgtcatgactgtcccttcatacattgcaagtagcctgcttcgtccgctctcagatgttgctgcagattctctttctaagttttactatccaccagtcgcagcagtgtccctttcttatcccaaagaagcaattagaccagaatgcttgatcgatggagaactaaaaggattcgggcaattg

SEQ ID NO: 623 - DNA, 200 bp, Amaranthus viridis
caattgcccgaatccttttagttctccatcgatcaagcattctggtctaattgcttctttgggataagaaagggacactgctgcgactggtggatagtaaaacttagaaagagaatctgcagcaacatctgagagcggacgaagcaggctacttgcaatgtatgaagggacagtcatgacaaccgctttggtcctaacag

SEQ ID NO: 624 - DNA, 200 bp, Amaranthus viridis
agaactaaaaggattcgggcaattgcatccccgcagccagggtgtggaaaccttgggaacaatttatagttcatctcttttccctggtcgagcaccacccggtaggaccttgatcttgagctacattggaggtgctacaaatgttggaatattacaaaagagtgaagatgaacttgcggagacagttgataaggatctca

SEQ ID NO: 625 - DNA, 200 bp, Amaranthus viridis
tgagatccttatcaactgtctccgcaagttcatcttcactcttttgtaatattccaacatttgtagcacctccaatgtagctcaagatcaaggtcctaccgggtggtgctcgaccagggaaaagagatgaactataaattgttcccaaggtttccacaccctggctgcggggatgcaattgcccgaatccttttagttct

SEQ ID NO: 626 - DNA, 200 bp, Amaranthus viridis
gcggagacagttgataaggatctcagaaaaattctgataaatccaaatgcgaaaggcagccgtgttctgggagtgagagtatggccaaaggcaatcccccaatttttagttggtcactttgatctgctagatgctgcaaaagctggtttggcaaatgctgggctaaaggggttgtttcttggtggtaattatgtatcagg

SEQ ID NO: 627 - DNA, 200 bp, Amaranthus viridis
cctgatacataattaccaccaagaaacaacccctttagcccagcatttgccaaaccagcttttgcagcatctagcagatcaaagtgaccaactaaaaattgggggattgcctttggccatactctcactcccagaacacggctgcctttcgcatttggatttatcagaatttttctgagatccttatcaactgtctccgc

SEQ ID NO: 628 - DNA, 200 bp, Amaranthus viridis
ttcttggtggtaattatgtatcaggtgttgccttggggaggtgtatagagggtgcttatgactctgcatctcaggtagtggatttcctctcacagtacaaagacaagtagtcaatagggctccaccttcctggttaactaacttttgtagctcttgtaatttgtatcatgtaatattattcagatgtaaaagatacagtc

SEQ ID NO: 629 - DNA, 200 bp, Amaranthus viridis
gactgtatcttttacatctgaataatattacatgatacaaattacaagagctacaaaagttagttaaccaggaaggtggagccctattgactacttgtctttgtactgtgagaggaaatccactacctgagatgcagagtcataagcaccctctatacacctccccaaggcaacacctgatacataattaccaccaagaa

SEQ ID NO: 630 - DNA, 200 bp, Ambrosia trifida
atcccaccgcttttgcgctttgcgcctcggttttggacctcgtcgctttagtgcgcttcgcgctttttaaaaccaagcttctatcgagtttaatgactaaaatttagtaaaatataatgaccaatatggaaggtatttcatgacaattaaccctaaatatattaggtaaccacaaaggagggctctctgttgggaaagca

SEQ ID NO: 631 - DNA, 200 bp, Ambrosia trifida
tgctttcccaacagagagccctcctttgtggttacctaatatatttagggttaattgtcatgaaataccttccatattggtcattatattttactaaattttagtcattaaactcgatagaagcttggttttaaaaagcgcgaagcgcactaaagcgacgaggtccaaaaccgaggcgcaaagcgcaaaagcggtgggat

SEQ ID NO: 632 - DNA, 200 bp, Ambrosia trifida
aggagggctctctgttgggaaagcaatatcctccggatgcaaagcagccgaatccgtgattgcatatttggattcttattcggaccagaagtagaaggatgggtgttgctagattatgttttaaccggtaaactttatttcttatatcttatttttattcttatttttcaatgcaaagagtcaaacgacgcaagtgtgat

SEQ ID NO: 633 - DNA, 200 bp, Ambrosia trifida
atcacacttgcgtcgtttgactctttgcattgaaaaataagaataaaaataagatataagaaataaagtttaccggttaaaacataatctagcaacacccatccttctacttctggtccgaataagaatccaaatatgcaatcacggattcggctgctttgcatccggaggatattgctttcccaacagagagccctcct

SEQ ID NO: 634 - DNA, 200 bp, Ambrosia trifida
cgcacgcaatggttttgcacttttgcccacagtaaagaaaaggtagcctctctacccgacccgacccgacccgaaccaaaccgataaaaacaaataccaactctgataaccagattactcacagagaaaccaacaatggcttcaccaactatagttgacaaccaaagttagggttcttctaaattctaattacattttat

SEQ ID NO: 635 - DNA, 200 bp, Ambrosia trifida
ataaaatgtaattagaatttagaagaaccctaactttggttgtcaactatagttggtgaagccattgttggtttctctgtgagtaatctggttatcagagttggtatttgtttttatcggtttggttcgggtcgggtcgggtcgggtagagaggctaccttttctttactgtgggcaaaagtgcaaaaccattgcgtgcg

SEQ ID NO: 636 - DNA, 200 bp, Ambrosia trifida
cttctaaattctaattacattttatcctaattttacttacacatttgtagcatttgcatctataattcagaaacctaatctaatttattaattaattaattaagtggttttgttttctctacagaacctgctaagagagttgctgttgttggtgctggtgtcaggtacttaaacttaaaacctaaaacagataattattt

SEQ ID NO: 637 - DNA, 200 bp, Ambrosia trifida
aaataattatctgttttaggttttaagtttaagtacctgacaccagcaccaacaacagcaactctcttagcaggttctgtagagaaaacaaaaccacttaattaattaattaataaattagattaggtttctgaattatagatgcaaatgctacaaatgtgtaagtaaaattaggataaaatgtaattagaatttagaag

SEQ ID NO: 638 - DNA, 200 bp, Ambrosia trifida
taaaacctaaaacagataattattttgcttatttactagattcacttattctgttcatgtaatttgctaaggtttgatcagtcaattatatacatttagggatttaggagttacagaatgttttgatataataatatatacaatttgtaaaaatatatagatcatgattgataattagaggaatggaatattttgataat

SEQ ID NO: 639 - DNA, 200 bp, Ambrosia trifida
attatcaaaatattccattcctctaattatcaatcatgatctatatatttttacaaattgtatatattattatatcaaaacattctgtaactcctaaatccctaaatgtatataattgactgatcaaaccttagcaaattacatgaacagaataagtgaatctagtaaataagcaaaataattatctgttttaggtttta

SEQ ID NO: 640 - DNA, 200 bp, Ambrosia trifida
tagaggaatggaatattttgataattgaaaaaacaatatgttacatttttttcagtggttgtgctgctgcttataagttaaagttacatggattgaatgtgactgtgtttgaagctgatgggagcgttggtgggaaactaaagagcgtttcgcaagatggtttaatatgggatgagggtgccaatactatggtatgtttt

SEQ ID NO: 641 - DNA, 200 bp, Ambrosia trifida
aaaacataccatagtattggcaccctcatcccatattaaaccatcttgcgaaacgctctttagtttcccaccaacgctcccatcagcttcaaacacagtcacattcaatccatgtaactttaacttataagcagcagcacaaccactgaaaaaaatgtaacatattgttttttcaattatcaaaatattccattcctcta

SEQ ID NO: 642 - DNA, 200 bp, Ambrosia trifida
gggtgccaatactatggtatgttttagtataatatgattggtttcactttgttagcattttttatgaggtttgttgtatgtgttaccttatgtagactgagagtgaggcagatgttagcagtttgattgatgatcttgggcttcgagataaacagcagtttgtaagttgttgtgtttgatatagctgccatacttcctat

SEQ ID NO: 643 - DNA, 200 bp, Ambrosia trifida
ataggaagtatggcagctatatcaaacacaacaacttacaaactgctgtttatctcgaagcccaagatcatcaatcaaactgctaacatctgcctcactctcagtctacataaggtaacacatacaacaaacctcataaaaaatgctaacaaagtgaaaccaatcatattatactaaaacataccatagtattggcaccc

SEQ ID NO: 644 - DNA, 200 bp, Ambrosia trifida
ttgatatagctgccatacttcctatagcttgtgtggtaaattatatctatgaacatatgcaattattttgtaaaatgacaagaaacagattctttgttttatttgtgtatgaataatgaatagataagactaaattcatttttaggtctgcttcgatttgtcttttataatcactacgctgagttttaaatctttaacat

SEQ ID NO: 645 - DNA, 200 bp, Ambrosia trifida
atgttaaagatttaaaactcagcgtagtgattataaaagacaaatcgaagcagacctaaaaatgaatttagtcttatctattcattattcatacacaaataaaacaaagaatctgtttcttgtcattttacaaaataattgcatatgttcatagatataatttaccacacaagctataggaagtatggcagctatatcaa

SEQ ID NO: 646 - DNA, 200 bp, Ambrosia trifida
acgctgagttttaaatctttaacattatttcctgttgcagccaatttcacagcacaagcggtacattgtaagaaatggaaaacctgtattggtatggatatctcaacaccacttaactagtgatcctctatttttagtaaaattcatttactaaaaaaaggggggctgaaaaattaaaatttaatgtgaattgtgcttta

SEQ ID NO: 647 - DNA, 200 bp, Ambrosia trifida
taaagcacaattcacattaaattttaatttttcagcccccctttttttagtaaatgaattttactaaaaatagaggatcactagttaagtggtgttgagatatccataccaatacaggttttccatttcttacaatgtaccgcttgtgctgtgaaattggctgcaacaggaaataatgttaaagatttaaaactcagcgt

SEQ ID NO: 648 - DNA, 200 bp, Ambrosia trifida
aaaatttaatgtgaattgtgctttattaggtttgaatgcttaacctcatcaaagtcaaataataacatgagtagtctgttgctctggaaacccgtattgcaacccatgaaaagatccaaatcacggtttttcaaacactgttttatacttttatgtccagggaacaaaaaaccaaaatctttcctgagtgaggccttagt

SEQ ID NO: 649 - DNA, 200 bp, Ambrosia trifida
actaaggcctcactcaggaaagattttggttttttgttccctggacataaaagtataaaacagtgtttgaaaaaccgtgatttggatcttttcatgggttgcaatacgggtttccagagcaacagactactcatgttattatttgactttgatgaggttaagcattcaaacctaataaagcacaattcacattaaatttt

SEQ ID NO: 650 - DNA, 200 bp, Ambrosia trifida
aatctttcctgagtgaggccttagttgtcttcttattatttatcttttatatttatcaagttcatgtctctctatattgaccatgactcagtctatatcatgattgcagataccttctaacccaattgcactgattagcagcagttttctttccactcagtcaaaggtatgttagtagctcctgccaccttgaaggttca

SEQ ID NO: 651 - DNA, 200 bp, Ambrosia trifida
tgaaccttcaaggtggcaggagctactaacatacctttgactgagtggaaagaaaactgctgctaatcagtgcaattgggttagaaggtatctgcaatcatgatatagactgagtcatggtcaatatagagagacatgaacttgataaatataaaagataaataataagaagacaactaaggcctcactcaggaaagatt

SEQ ID NO: 652 - DNA, 200 bp, Ambrosia trifida
tagctcctgccaccttgaaggttcaagcataagtatgccatatcttattgagatcgttcactcgcatactatcttcttaatgttgttcaatgttgagattaaagtgcaatctttattctattttgcttaatcaaatataatgtttatttattttaattttattaaaaaagtatctacgtaagtattacaaaaagtaaaaa

SEQ ID NO: 653 - DNA, 200 bp, Ambrosia trifida
tttttactttttgtaatacttacgtagatacttttttaataaaattaaaataaataaacattatatttgattaagcaaaatagaataaagattgcactttaatctcaacattgaacaacattaagaagatagtatgcgagtgaacgatctcaataagatatggcatacttatgcttgaaccttcaaggtggcaggagcta

SEQ ID NO: 654 - DNA, 200 bp, Ambrosia trifida
acgtaagtattacaaaaagtaaaaactcttccccgttgatgagatgatctcaaagtctaatgtcatatatctagtactctcaataagctaacataaacagtatagtctattaaaagggtccccaacatcgaaatgagtaacgctgctttgagttaagggtgcaaaatgtcatataataaataaagatgttctatgatgct

SEQ ID NO: 655 - DNA, 200 bp, Ambrosia trifida
agcatcatagaacatctttatttattatatgacattttgcacccttaactcaaagcagcgttactcatttcgatgttggggacccttttaatagactatactgtttatgttagcttattgagagtactagatatatgacattagactttgagatcatctcatcaacggggaagagtttttactttttgtaatacttacgt

SEQ ID NO: 656 - DNA, 200 bp, Ambrosia trifida
ataaataaagatgttctatgatgctttgatatttgtttcgcactttcacttatcccccatggtatttttaacttgtttttaaaagtagaagattttttttattgatgtgcatgcgattattatcggctttgtttgcaaattttacaggttcaaattcttttagagccatttttatggaagaagactaagtcatctgacga

SEQ ID NO: 657 - DNA, 200 bp, Ambrosia trifida
tcgtcagatgacttagtcttcttccataaaaatggctctaaaagaatttgaacctgtaaaatttgcaaacaaagccgataataatcgcatgcacatcaataaaaaaaatcttctacttttaaaaacaagttaaaaataccatgggggataagtgaaagtgcgaaacaaatatcaaagcatcatagaacatctttatttat

SEQ ID NO: 658 - DNA, 200 bp, Ambrosia trifida
ggaagaagactaagtcatctgacgaacccgagaggtaaaatacatagccttgttccatttcatcggcttgaagtagttatattcggtacatgccattaggttcttaaccatgtattttgcagtgttggaggattctttcaacgtcattttgggaaggaggtgtttgtatattcgacataatgttttgtttctgttctgat

SEQ ID NO: 659 - DNA, 200 bp, Ambrosia trifida
atcagaacagaaacaaaacattatgtcgaatatacaaacacctccttcccaaaatgacgttgaaagaatcctccaacactgcaaaatacatggttaagaacctaatggcatgtaccgaatataactacttcaagccgatgaaatggaacaaggctatgtattttacctctcgggttcgtcagatgacttagtcttcttcc

SEQ ID NO: 660 - DNA, 200 bp, Ambrosia trifida
cataatgttttgtttctgttctgattctgtttctcatagttattaatatttgacctgcttatctaaggttgttgagtatctcattgatccagttgttgcgggaacaagcggtggagatcctgaatcactctctgtgagtaactattgtttctccacacatttttttggagaaatatacattgctgctttacattaacgac

SEQ ID NO: 661 - DNA, 200 bp, Ambrosia trifida
gtcgttaatgtaaagcagcaatgtatatttctccaaaaaaatgtgtggagaaacaatagttactcacagagagtgattcaggatctccaccgcttgttcccgcaacaactggatcaatgagatactcaacaaccttagataagcaggtcaaatattaataactatgagaaacagaatcagaacagaaacaaaacattatg

SEQ ID NO: 662 - DNA, 200 bp, Ambrosia trifida
tacattgctgctttacattaacgaccttaaaccgtttaatatattgcttgaattcttttacttttccacacagatgcgtcatgcatttcctgagctatgggatttagagagaaggtatgtttgtaacaaacagtagtaattcttcttcaaacgatctgtggaataatgacttttgaccacttatttctgaagacctaaaa

SEQ ID NO: 663 - DNA, 200 bp, Ambrosia trifida
ttttaggtcttcagaaataagtggtcaaaagtcattattccacagatcgtttgaagaagaattactactgtttgttacaaacataccttctctctaaatcccatagctcaggaaatgcatgacgcatctgtgtggaaaagtaaaagaattcaagcaatatattaaacggtttaaggtcgttaatgtaaagcagcaatgta

SEQ ID NO: 664 - DNA, 200 bp, Ambrosia trifida
accacttatttctgaagacctaaaatcaatttaatacttacaactatttaattcaggtttggttcaatcatttctggggcatttcaatctatggtatcttccagaggtgggaaaaggaaaccttctggaaacagcaaacgtaggcgtggttccttttctttttttggtgggatgcaggtaagacgagggtgatttactga

SEQ ID NO: 665 - DNA, 200 bp, Ambrosia trifida
tcagtaaatcaccctcgtcttacctgcatcccaccaaaaaaagaaaaggaaccacgcctacgtttgctgtttccagaaggtttccttttcccacctctggaagataccatagattgaaatgccccagaaatgattgaaccaaacctgaattaaatagttgtaagtattaaattgattttaggtcttcagaaataagtggt

SEQ ID NO: 666 - DNA, 200 bp, Ambrosia trifida
aggtaagacgagggtgatttactgatttagataagaccctaaatttagttattgttatcttttaattaattacagatgttatttgggtcgttcatgcttttttgctatgcagacactcactgatgcactatgcaaagagattggaccccatgaagttaatcttcaatcaaaggtgcttgaaatgtcctacagctgcgatg

SEQ ID NO: 667 - DNA, 200 bp, Ambrosia trifida
catcgcagctgtaggacatttcaagcacctttgattgaagattaacttcatggggtccaatctctttgcatagtgcatcagtgagtgtctgcatagcaaaaaagcatgaacgacccaaataacatctgtaattaattaaaagataacaataactaaatttagggtcttatctaaatcagtaaatcaccctcgtcttacct

SEQ ID NO: 668 - DNA, 200 bp, Ambrosia trifida
cttgaaatgtcctacagctgcgatgataatgcggttggtaattggtcaatttattgtgctccagatcaaaacaaacaatttcagcaatcttttgatgctgtgatcatgactgtgagtgccttcattgggtaatcttttacttatcagtgacataaagttagttaatttcttgcattcttgatgaagatagttttttgtat

SEQ ID NO: 669 - DNA, 200 bp, Ambrosia trifida
atacaaaaaactatcttcatcaagaatgcaagaaattaactaactttatgtcactgataagtaaaagattacccaatgaaggcactcacagtcatgatcacagcatcaaaagattgctgaaattgtttgttttgatctggagcacaataaattgaccaattaccaaccgcattatcatcgcagctgtaggacatttcaag

SEQ ID NO: 670 - DNA, 200 bp, Ambrosia trifida
tcttgatgaagatagttttttgtatctttaaagtttattctgtgtcctctaggtagtatctggatattaatacatgggatgggaatttttttaatcttgagtttttctctgatggttattaagtgttagatgcatctaattttaactgacaaagaaaatattccccaattaggccccacttaacaatgtaaaagaaatga

SEQ ID NO: 671 - DNA, 200 bp, Ambrosia trifida
tcatttcttttacattgttaagtggggcctaattggggaatattttctttgtcagttaaaattagatgcatctaacacttaataaccatcagagaaaaactcaagattaaaaaaattcccatcccatgtattaatatccagatactacctagaggacacagaataaactttaaagatacaaaaaactatcttcatcaaga

SEQ ID NO: 672 - DNA, 200 bp, Ambrosia trifida
ccacttaacaatgtaaaagaaatgaagattacaaagacaggaagtccgtttctgcttaattttattccagaggtatgtttttttttcttctactaaagcattagttttagttctatcaaatctaacactgaatacagaaaacagctttaacatcgtcatccaattaaattgtgaaatatttatagtgtcatttcttagcc

SEQ ID NO: 673 - DNA, 200 bp, Ambrosia trifida
ggctaagaaatgacactataaatatttcacaatttaattggatgacgatgttaaagctgttttctgtattcagtgttagatttgatagaactaaaactaatgctttagtagaagaaaaaaaaacatacctctggaataaaattaagcagaaacggacttcctgtctttgtaatcttcatttcttttacattgttaagtgg

SEQ ID NO: 674 - DNA, 200 bp, Ambrosia trifida
atatttatagtgtcatttcttagccttttgtttttataatacaggtgagttatttgccattatcagtaataatctccactttcaagaaagaaaacgtgaagcagcctcttgagggttttggagttcttgttcctgccaaggagcaggaaaatggtttgaggacactaggtgaagcttgattctgccctccattattgttt

SEQ ID NO: 675 - DNA, 200 bp, Ambrosia trifida
aaacaataatggagggcagaatcaagcttcacctagtgtcctcaaaccattttcctgctccttggcaggaacaagaactccaaaaccctcaagaggctgcttcacgttttctttcttgaaagtggagattattactgataatggcaaataactcacctgtattataaaaacaaaaggctaagaaatgacactataaatat

SEQ ID NO: 676 - DNA, 200 bp, Ambrosia trifida
ttgattctgccctccattattgttttttatttgtttacattgacaccatagcaaaaattctgctatgcaggcaccctcttctcttccatgatgtttccagatcgggcctcagaagacgtgtacctttacaccacctttgttgggggtagtcgaaacaaagaactggccaaagcttcgaggtaggcaggcttgctcatcac

SEQ ID NO: 677 - DNA, 200 bp, Ambrosia trifida
gtgatgagcaagcctgcctacctcgaagctttggccagttctttgtttcgactacccccaacaaaggtggtgtaaaggtacacgtcttctgaggcccgatctggaaacatcatggaagagaagagggtgcctgcatagcagaatttttgctatggtgtcaatgtaaacaaataaaaaacaataatggagggcagaatcaa

SEQ ID NO: 678 - DNA, 200 bp, Ambrosia trifida
cgaggtaggcaggcttgctcatcaccatattcccccttaaaattgtagtgtgaacttaactcaagttctaattaattttttgtgcatatgttcaaaatctatgatagccttctgaaagacaaagtaaaaaaagtctttactgattaattgtggtaaaatcaatttattcataatgacgttaattgacaaataggtcttgg

SEQ ID NO: 679 - DNA, 200 bp, Ambrosia trifida
ccaagacctatttgtcaattaacgtcattatgaataaattgattttaccacaattaatcagtaaagactttttttactttgtctttcagaaggctatcatagattttgaacatatgcacaaaaaattaattagaacttgagttaagttcacactacaattttaagggggaatatggtgatgagcaagcctgcctacctcg

SEQ ID NO: 680 - DNA, 200 bp, Ambrosia trifida
acgttaattgacaaataggtcttggaaactttcctagtagaggatatgttgtaacttttaactcaaaaatctttcttgcaaaatagggacgagttgaagcagatagtaacttctgacctcagacagttgcttggaacagaaggggagccaaaatttctaacgtaagggcacaacgctatttcagtttaacagtaatcttt

SEQ ID NO: 681 - DNA, 200 bp, Ambrosia trifida
aaagattactgttaaactgaaatagcgttgtgcccttacgttagaaattttggctccccttctgttccaagcaactgtctgaggtcagaagttactatctgcttcaactcgtccctattttgcaagaaagatttttgagttaaaagttacaacatatcctctactaggaaagtttccaagacctatttgtcaattaacgt

SEQ ID NO: 682 - DNA, 200 bp, Ambrosia trifida
ctatttcagtttaacagtaatctttgctagaataagaaatgtaaccgcttgcctacctatggtctttttatctgttaaacaaaattttgtttaataaccactagcctggtgtagtggcaaaggtgtatctccctcatccaagaggtgttgggttctagtctcacttgagacaaggggaacattataagcggagtaaaaaa

SEQ ID NO: 683 - DNA, 200 bp, Ambrosia trifida
ttttttactccgcttataatgttccccttgtctcaagtgagactagaacccaacacctcttggatgagggagatacacctttgccactacaccaggctagtggttattaaacaaaattttgtttaacagataaaaagaccataggtaggcaagcggttacatttcttattctagcaaagattactgttaaactgaaatag

SEQ ID NO: 684 - DNA, 200 bp, Ambrosia trifida
ggaacattataagcggagtaaaaaattagccgtttaaaaaaaaaaaagtttgtaatttgaagttttccatcatgaactgaaacagttgctaaaatgtaacaagaagttattaaagtcttgaggtacatagatatatacacaatgtaaatatggcttacggagttgtgaggttgattgcagtcactattattggagcaaag

SEQ ID NO: 685 - DNA, 200 bp, Ambrosia trifida
ctttgctccaataatagtgactgcaatcaacctcacaactccgtaagccatatttacattgtgtatatatctatgtacctcaagactttaataacttcttgttacattttagcaactgtttcagttcatgatggaaaacttcaaattacaaacttttttttttttaaacggctaattttttactccgcttataatgttcc

SEQ ID NO: 686 - DNA, 200 bp, Ambrosia trifida
tgcagtcactattattggagcaaagcatttccattgtatgggcgtgactatggttcagttattgaagcaattgagaagatggaaaaagagctacccggttacttttatgcaggtaacatgttttgtcttgaaaataaaaatggacaaatcatatgttgatgagtagaggtggcaattttgacctattataacttacagag

SEQ ID NO: 687 - DNA, 200 bp, Ambrosia trifida
ctctgtaagttataataggtcaaaattgccacctctactcatcaacatatgatttgtccatttttattttcaagacaaaacatgttacctgcataaaagtaaccgggtagctctttttccatcttctcaattgcttcaataactgaaccatagtcacgcccatacaatggaaatgctttgctccaataatagtgactgca

SEQ ID NO: 688 - DNA, 200 bp, Ambrosia trifida
gactgacagagaaaccaacaatggcttcaccaactatagttgacaaccaaaaacctgctaagagagttgctgttgttggtgctggtgtcagtggttgtgctgctgcttataagttaaagttacatggattgaatgtgactgtgtttgaagctgatgggagcgttggtgggaaactaaagagcgtttcgcaagatggttta

SEQ ID NO: 689 - DNA, 200 bp, Ambrosia trifida
taaaccatcttgcgaaacgctctttagtttcccaccaacgctcccatcagcttcaaacacagtcacattcaatccatgtaactttaacttataagcagcagcacaaccactgacaccagcaccaacaacagcaactctcttagcaggtttttggttgtcaactatagttggtgaagccattgttggtttctctgtcagtc

SEQ ID NO: 690 - DNA, 200 bp, Ambrosia trifida
aaagagcgtttcgcaagatggtttaatatgggatgagggtgccaatactatgactgagagtgaggcagatgttagcagtttgattgatgatcttgggcttcgagataaacagcagtttccaatttcacagcacaagcggtacattgtaagaaatggaaaacctgtattgataccttctaacccaattgcactgattagca

SEQ ID NO: 691 - DNA, 200 bp, Ambrosia trifida
tgctaatcagtgcaattgggttagaaggtatcaatacaggttttccatttcttacaatgtaccgcttgtgctgtgaaattggaaactgctgtttatctcgaagcccaagatcatcaatcaaactgctaacatctgcctcactctcagtcatagtattggcaccctcatcccatattaaaccatcttgcgaaacgctcttt

SEQ ID NO: 692 - DNA, 200 bp, Ambrosia trifida
tctaacccaattgcactgattagcagcagttttctttccactcagtcaaaggttcaaattcttttagagccatttttatggaagaagactaagtcatctgacgaacccgagagtgttggaggattctttcaacgtcattttgggaaggaggttgttgagtatctcattgatccagttgttgcgggaacaagcggtggaga

SEQ ID NO: 693 - DNA, 200 bp, Ambrosia trifida
tctccaccgcttgttcccgcaacaactggatcaatgagatactcaacaacctccttcccaaaatgacgttgaaagaatcctccaacactctcgggttcgtcagatgacttagtcttcttccataaaaatggctctaaaagaatttgaacctttgactgagtggaaagaaaactgctgctaatcagtgcaattgggttaga

SEQ ID NO: 694 - DNA, 200 bp, Ambrosia trifida
ttgttgcgggaacaagcggtggagatcctgaatcactctctatgcgtcatgcatttcctgagctatgggatttagagagaaggtttggttcaatcatttctggggcatttcaatctatggtatcttccagaggtgggaaaaggaaaccttctggaaacagcaaacgtaggcgtggttccttttctttttttggtgggatg

SEQ ID NO: 695 - DNA, 200 bp, Ambrosia trifida
catcccaccaaaaaaagaaaaggaaccacgcctacgtttgctgtttccagaaggtttccttttcccacctctggaagataccatagattgaaatgccccagaaatgattgaaccaaaccttctctctaaatcccatagctcaggaaatgcatgacgcatagagagtgattcaggatctccaccgcttgttcccgcaacaa

SEQ ID NO: 696 - DNA, 200 bp, Ambrosia trifida
ttccttttctttttttggtgggatgcagacactcactgatgcactatgcaaagagattggaccccatgaagttaatcttcaatcaaaggtgcttgaaatgtcctacagctgcgatgataatgcggttggtaattggtcaatttattgtgctccagatcaaaacaaacaatttcagcaatcttttgatgctgtgatcatga

SEQ ID NO: 697 - DNA, 200 bp, Ambrosia trifida
tcatgatcacagcatcaaaagattgctgaaattgtttgttttgatctggagcacaataaattgaccaattaccaaccgcattatcatcgcagctgtaggacatttcaagcacctttgattgaagattaacttcatggggtccaatctctttgcatagtgcatcagtgagtgtctgcatcccaccaaaaaaagaaaaggaa

SEQ ID NO: 698 - DNA, 200 bp, Ambrosia trifida
ggaacatcaaccagataagactttcccccaataaaaatgtcatctctcacaaacctcccttccctgaaccactaccgcacctggtcttccccacccattccccatcgaacccaatcatccaaaccccctaaccacctaaccacctatggtcccaccaataacaaccacaacagacgtacaacaacaaccttccgttgctc

SEQ ID NO: 699 - DNA, 200 bp, Ambrosia trifida
gagcaacggaaggttgttgttgtacgtctgttgtggttgttattggtgggaccataggtggttaggtggttagggggtttggatgattgggttcgatggggaatgggtggggaagaccaggtgcggtagtggttcagggaagggaggtttgtgagagatgacatttttattgggggaaagtcttatctggttgatgttcc

SEQ ID NO: 700 - DNA, 200 bp, Ambrosia trifida
gtacaacaacaaccttccgttgctcaatagccaacgacactccaatctctcctccaattaccaacgactccaattctaaacccttactggactgtgttattattggtgctggaatcagtggtctctgcattgcccaagccctagctactaaacatgctgacgtgtcacctgatgtggttgttacggaagcacgtgatagg

SEQ ID NO: 701 - DNA, 200 bp, Ambrosia trifida
cctatcacgtgcttccgtaacaaccacatcaggtgacacgtcagcatgtttagtagctagggcttgggcaatgcagagaccactgattccagcaccaataataacacagtccagtaagggtttagaattggagtcgttggtaattggaggagagattggagtgtcgttggctattgagcaacggaaggttgttgttgtac

SEQ ID NO: 702 - DNA, 200 bp, Ambrosia trifida
ggttgttacggaagcacgtgatagggttggaggtaatatatcgacggttgaacgtgatggatatttgtgggaagaaggtccgaatagttttcaaccgtctgatccgatgctcactatggtggtggatagtgggttgaaagatgatttggttttaggggaccccactgcaccacggtttgtattgtggggtggtggtttga

SEQ ID NO: 703 - DNA, 200 bp, Ambrosia trifida
tcaaaccaccaccccacaatacaaaccgtggtgcagtggggtcccctaaaaccaaatcatctttcaacccactatccaccaccatagtgagcatcggatcagacggttgaaaactattcggaccttcttcccacaaatatccatcacgttcaaccgtcgatatattacctccaaccctatcacgtgcttccgtaacaacc

SEQ ID NO: 704 - DNA, 200 bp, Ambrosia trifida
tttgtattgtggggtggtggtttgaagccagtgccttccagtccagctgatttgcctttctttgatctaatgagctttactggaaaactcagagccggttttggtgctctagggatccgccctccaccaccagatcgtgaggaatctgttgaagaatttgttcggcgtaaccttggtgatgaagtttttgaacgcttaat

SEQ ID NO: 705 - DNA, 200 bp, Ambrosia trifida
attaagcgttcaaaaacttcatcaccaaggttacgccgaacaaattcttcaacagattcctcacgatctggtggtggagggcggatccctagagcaccaaaaccggctctgagttttccagtaaagctcattagatcaaagaaaggcaaatcagctggactggaaggcactggcttcaaaccaccaccccacaatacaaa

SEQ ID NO: 706 - DNA, 200 bp, Ambrosia trifida
gtgatgaagtttttgaacgcttaatagaaccattttgttcaggtgtttatgctggcgacccatcaaaacttagtatgaaagcagcatttggtaaagtttggaagctggagaagaatggtggtagcattattggtggagcattcaaagcaatccaagcaaaaataagagtaccaagcctcctcgggacccgagattaccaa

SEQ ID NO: 707 - DNA, 200 bp, Ambrosia trifida
ttggtaatctcgggtcccgaggaggcttggtactcttatttttgcttggattgctttgaatgctccaccaataatgctaccaccattcttctccagcttccaaactttaccaaatgctgctttcatactaagttttgatgggtcgccagcataaacacctgaacaaaatggttctattaagcgttcaaaaacttcatcac

SEQ ID NO: 708 - DNA, 200 bp, Ambrosia trifida
cctcctcgggacccgagattaccaacaccaaagggccaaactgttggatcttttaggaagggacaagccatgttgcccaatgccatctcaaaacgtttgggtagcagagtgaaagtgtcatggaagctaataaatatctcaaagttggagaatagaggttataatctgacttacgaaacaccaaatggatttgcaagtct

SEQ ID NO: 709 - DNA, 200 bp, Ambrosia trifida
agacttgcaaatccatttggtgtttcgtaagtcagattataacctctattctccaactttgagatatttattagcttccatgacactttcactctgctacccaaacgttttgagatggcattgggcaacatggcttgtcccttcctaaaagatccaacagtttggccctttggtgttggtaatctcgggtcccgaggagg

SEQ ID NO: 710 - DNA, 200 bp, Ambrosia trifida
aaacaccaaatggatttgcaagtctgcaaactaaaactgttgtcatgactgttccttcctacgtggcgagtgacttgttgcgtcctctttcgtcggaagcagcagaggctttgtccaaattttattaccctccagttgctgctgtatctgtttcctatccaaaagaagcgattcgtgctgaccgtttgatcgatggtcaa

SEQ ID NO: 711 - DNA, 200 bp, Ambrosia trifida
ttgaccatcgatcaaacggtcagcacgaatcgcttcttttggataggaaacagatacagcagcaactggagggtaataaaatttggacaaagcctctgctgcttccgacgaaagaggacgcaacaagtcactcgccacgtaggaaggaacagtcatgacaacagttttagtttgcagacttgcaaatccatttggtgttt

SEQ ID NO: 712 - DNA, 200 bp, Ambrosia trifida
tgctgaccgtttgatcgatggtcaacttaagggttttggtcaattacatccaagaagtcaaggcgttgagactttaggtaccatctatagctcatcccttttccctaaccgggcgccacctggaagggttctcctccttaactacattggaggggctacaaatcctggtattttgtcgaagacggagagtgaacttgtgg

SEQ ID NO: 713 - DNA, 200 bp, Ambrosia trifida
ccacaagttcactctccgtcttcgacaaaataccaggatttgtagcccctccaatgtagttaaggaggagaacccttccaggtggcgcccggttagggaaaagggatgagctatagatggtacctaaagtctcaacgccttgacttcttggatgtaattgaccaaaacccttaagttgaccatcgatcaaacggtcagca

SEQ ID NO: 714 - DNA, 200 bp, Ambrosia trifida
tcgaagacggagagtgaacttgtggaagcagttgaccgtgacctaaggaagatgctcataaaccctagagcaggcgaaccgttgactttgggggtcaaagtgtggcctcgagcaatcccacagtttctaattggtcattttgacattttggatgctgcaaaatttgctcttagtgaaggtggatatagaggtatgtttct

SEQ ID NO: 715 - DNA, 200 bp, Ambrosia trifida
agaaacatacctctatatccaccttcactaagagcaaattttgcagcatccaaaatgtcaaaatgaccaattagaaactgtgggattgctcgaggccacactttgacccccaaagtcaacggttcgcctgctctagggtttatgagcatcttccttaggtcacggtcaactgcttccacaagttcactctccgtcttcga

SEQ ID NO: 716 - DNA, 200 bp, Ambrosia trifida
aaggtggatatagaggtatgtttcttggaggcaactatgtttctggtgtggctttaggtcgatgcgtggagagtgcttatgacgttgcagccgatgtaagtacatttttgtcacgaggcgtgtataagtgatactgttatgtagcactttggaatactttcttgtgaggttagtggttacctttttgtcacaaggcaggt

SEQ ID NO: 717 - DNA, 200 bp, Ambrosia trifida
acctgccttgtgacaaaaaggtaaccactaacctcacaagaaagtattccaaagtgctacataacagtatcacttatacacgcctcgtgacaaaaatgtacttacatcggctgcaacgtcataagcactctccacgcatcgacctaaagccacaccagaaacatagttgcctccaagaaacatacctctatatccacctt

SEQ ID NO: 718 - DNA, 200 bp, Ambrosia trifida
ttgcgcctcggttttggacctcgtcgctttagtgcgcttcgcgctttttaaaaccaagcttctatcgagtttaatgactaaaatttagtaaaatataatgaccaatatggaaggtatttcatgacaattaaccctaaatatattaggtaaccacaaaggagggctctctgttgggaaagcaatatcctccggatgcaaag

SEQ ID NO: 719 - DNA, 200 bp, Ambrosia trifida
ctttgcatccggaggatattgctttcccaacagagagccctcctttgtggttacctaatatatttagggttaattgtcatgaaataccttccatattggtcattatattttactaaattttagtcattaaactcgatagaagcttggttttaaaaagcgcgaagcgcactaaagcgacgaggtccaaaaccgaggcgcaa

SEQ ID NO: 720 - DNA, 200 bp, Ambrosia trifida
aaagcaatatcctccggatgcaaagcagccgaatccgtgattgcatatttggattcttattcggaccagaagtagaaggatgggtgttgctagatgatgttttaactggtaaactttatttcttatatcttattttttttcttatttttcaatgcaaagagtcaaacggcgcaagtgtaatatcaggattggccggagaa

SEQ ID NO: 721 - DNA, 200 bp, Ambrosia trifida
ttctccggccaatcctgatattacacttgcgccgtttgactctttgcattgaaaaataagaaaaaaaataagatataagaaataaagtttaccagttaaaacatcatctagcaacacccatccttctacttctggtccgaataagaatccaaatatgcaatcacggattcggctgctttgcatccggaggatattgcttt

SEQ ID NO: 722 - DNA, 200 bp, Ambrosia trifida
tgtaatatcaggattggccggagaatgtagatcaaaagagtttttgttcgctcgaggttggataaatttgacgaaaattcagcatggcttttcgctttgtgtttttgaaggtgagcaaggatggtgttgtataaacttattgttgagtaaattataactaatgacatgtttgaataatgtgttagaaaaaaatgaatctt

SEQ ID NO: 723 - DNA, 200 bp, Ambrosia trifida
aagattcatttttttctaacacattattcaaacatgtcattagttataatttactcaacaataagtttatacaacaccatccttgctcaccttcaaaaacacaaagcgaaaagccatgctgaattttcgtcaaatttatccaacctcgagcgaacaaaaactcttttgatctacattctccggccaatcctgatattaca

SEQ ID NO: 724 - DNA, 200 bp, Ambrosia trifida
aatgtgttagaaaaaaatgaatcttataattgaaaataatatgatcaatttatgatagtgttttcatgttagatataatcaaagtatgaaatcttatatcctaagaatggttatatatggtttagtaggttaagtgtgttttgacaatgatgcataataaggatttaacttggagaaacggtgacgtggacagcttgaag

SEQ ID NO: 725 - DNA, 200 bp, Ambrosia trifida
cttcaagctgtccacgtcaccgtttctccaagttaaatccttattatgcatcattgtcaaaacacacttaacctactaaaccatatataaccattcttaggatataagatttcatactttgattatatctaacatgaaaacactatcataaattgatcatattattttcaattataagattcatttttttctaacacatt

SEQ ID NO: 726 - DNA, 200 bp, Ambrosia trifida
tttctagcaatcttttgatgctgtgatcatgactgccccacttaacaatgtaaaagaaatgaagattacaaagacaggaagtccgtttctgcttaattttattccagaggtgagttatttgccaatatcagtaataatctccactttcaagaaagaaaacgtgaagcagcctcttgagggttttggagttcttgttcctg

SEQ ID NO: 727 - DNA, 200 bp, Ambrosia trifida
caggaacaagaactccaaaaccctcaagaggctgcttcacgttttctttcttgaaagtggagattattactgatattggcaaataactcacctctggaataaaattaagcagaaacggacttcctgtctttgtaatcttcatttcttttacattgttaagtggggcagtcatgatcacagcatcaaaagattgctagaaa

SEQ ID NO: 728 - DNA, 200 bp, Ambrosia trifida
gagggttttggagttcttgttcctgccaaggagcaggaaaatggtttgaggacactaggcaccctcttctcttccatgatgtttccagatcgggcctcagaagacgtgtacctttacaccacctttgttgggggtagtcgaaacaaagaactggccaaagcttcgagggacgagttgaagcagatagtaacttctgacct

SEQ ID NO: 729 - DNA, 200 bp, Ambrosia trifida
aggtcagaagttactatctgcttcaactcgtccctcgaagctttggccagttctttgtttcgactacccccaacaaaggtggtgtaaaggtacacgtcttctgaggcccgatctggaaacatcatggaagagaagagggtgcctagtgtcctcaaaccattttcctgctccttggcaggaacaagaactccaaaaccctc

SEQ ID NO: 730 - DNA, 200 bp, Ambrosia trifida
tgaagcagatagtaacttctgacctcagacagttgcttggaacagaaggggagccaaaatttctaactcactattattggagcaaagcatttccattgtatgggcgtgactatggttcagttattgaagcaattgagaagatggaaaaagagctacccggttacttttatgcaggtaaccacaaaggagggctctctgtt

SEQ ID NO: 731 - DNA, 200 bp, Ambrosia trifida
aacagagagccctcctttgtggttacctgcataaaagtaaccgggtagctctttttccatcttctcaattgcttcaataactgaaccatagtcacgcccatacaatggaaatgctttgctccaataatagtgagttagaaattttggctccccttctgttccaagcaactgtctgaggtcagaagttactatctgcttca

SEQ ID NO: 732 - DNA, 200 bp, Ambrosia trifida
taaccacaaaggagggctctctgttgggaaagcaatatcctccggatgcaaagcagccgaatccgtgattgcatatttggattcttattcggaccagaagtagaaggatgggtgttgctagatgatgttttaactggattggccggagaatgtagatcaaaagagtttttgttcgctagagcgaggataaatttgacgaa

SEQ ID NO: 733 - DNA, 200 bp, Ambrosia trifida
ttcgtcaaatttatcctcgctctagcgaacaaaaactcttttgatctacattctccggccaatccagttaaaacatcatctagcaacacccatccttctacttctggtccgaataagaatccaaatatgcaatcacggattcggctgctttgcatccggaggatattgctttcccaacagagagccctcctttgtggtta

SEQ ID NO: 734 - DNA, 200 bp, Chenopodium album
aaccctcaaaagaaaattttcactgcaatctttgtagccttcttgttagcaaaatactcggacaactaatcctagcaacagcgctatttgtttgagtattgtgagaggtaatccactacctcagctgcagattcataagcaccctctatacatcgccccaatgcaacacctgaaacatagttgccaccaagaaacaatcc

SEQ ID NO: 735 - DNA, 200 bp, Chenopodium album
ggattgtttcttggtggcaactatgtttcaggtgttgcattggggcgatgtatagagggtgcttatgaatctgcagctgaggtagtggattacctctcacaatactcaaacaaatagcgctgttgctaggattagttgtccgagtattttgctaacaagaaggctacaaagattgcagtgaaaattttcttttgagggtt

SEQ ID NO: 736 - DNA, 200 bp, Chenopodium album
catagttgccaccaagaaacaatcccttgaacccagcatcagttagagctgcttttgcagcatcaagcagatcaaagtggccaatcaaaaattgtggaattgcttggggccatactctcacgcccaaaacccggggatcttttgcattaggatttatgagaatgtttctcaagtccttgtcaactgccccagcaagttca

SEQ ID NO: 737 - DNA, 200 bp, Chenopodium album
tgaacttgctggggcagttgacaaggacttgagaaacattctcataaatcctaatgcaaaagatccccgggttttgggcgtgagagtatggccccaagcaattccacaatttttgattggccactttgatctgcttgatgctgcaaaagcagctctaactgatgctgggttcaagggattgtttcttggtggcaactatg

SEQ ID NO: 738 - DNA, 200 bp, Chenopodium album
cttgtcaactgccccagcaagttcatcttgcgtcttgtgtaatatactagtgtttgtagaacctccaatgtaactcaaaattaaggtcctaccaggtggtgctcgaccagggaaaagcgatgaactataaattgatcccaaggtttcaacaccctgactgcggggatgcaattgcccaaatccttgaagtttaccatcaa

SEQ ID NO: 739 - DNA, 200 bp, Chenopodium album
ttgatggtaaacttcaaggatttgggcaattgcatccccgcagtcagggtgttgaaaccttgggatcaatttatagttcatcgcttttccctggtcgagcaccacctggtaggaccttaattttgagttacattggaggttctacaaacactagtatattacacaagacgcaagatgaacttgctggggcagttgacaag

SEQ ID NO: 740 - DNA, 200 bp, Chenopodium album
ccaaatccttgaagtttaccatcaatcaaacactctgatctaattgcttcactaggataagaaagtgacacagctgcaactggtggatagtagaactttgcaagtgattctgcagcaacatctgaaagtggacgaaggaggctacttgcaatatgtgatgggacagtcatcacaacacttttggtccgtacagaaaccag

SEQ ID NO: 741 - DNA, 200 bp, Chenopodium album
ctggtttctgtacggaccaaaagtgttgtgatgactgtcccatcacatattgcaagtagcctccttcgtccactttcagatgttgctgcagaatcacttgcaaagttctactatccaccagttgcagctgtgtcactttcttatcctagtgaagcaattagatcagagtgtttgattgatggtaaacttcaaggatttgg

SEQ ID NO: 742 - DNA, 200 bp, Chenopodium album
cacttttggtccgtacagaaaccagtccatctggtgtttcataagtcagattatattctccatttggcaacttaacaatactagaaagggtccatgatagtttcactttgctgccaagcctttcagaaatggctgtaggcaacatagtgagtcctttcctgaaggatccaactgtctggcccttaggtttagggaggcgc

SEQ ID NO: 743 - DNA, 200 bp, Chenopodium album
gcgcctccctaaacctaagggccagacagttggatccttcaggaaaggactcactatgttgcctacagccatttctgaaaggcttggcagcaaagtgaaactatcatggaccctttctagtattgttaagttgccaaatggagaatataatctgacttatgaaacaccagatggactggtttctgtacggaccaaaagtg

SEQ ID NO: 744 - DNA, 200 bp, Chenopodium album
ctggcccttaggtttagggaggcgcgggtctcgaggtggctttggattgttctttctttcctggattgttttgagggtaccaccaatgatactaccacccttttgttccaagatccaaactttgccaaaagcagctttcatactcaacttggaaggatcgccagcatacacgcctgaacaaaagggttcaatcaagcgtt

SEQ ID NO: 745 - DNA, 200 bp, Chenopodium album
aacgcttgattgaacccttttgttcaggcgtgtatgctggcgatccttccaagttgagtatgaaagctgcttttggcaaagtttggatcttggaacaaaagggtggtagtatcattggtggtaccctcaaaacaatccaggaaagaaagaacaatccaaagccacctcgagacccgcgcctccctaaacctaagggccag

SEQ ID NO: 746 - DNA, 200 bp, Chenopodium album
gaacaaaagggttcaatcaagcgttcaaatacttcatcagcccagattacgacggacaaaatcttcaacagattcctcgtgagctggaggagaaggacgtaagccaagagcaccgagtccagacctaatcttgccagggaagctcataaggtcaaagaaagggaggtcagtgggcttggacggtacaggcctcaatttgc

SEQ ID NO: 747 - DNA, 200 bp, Chenopodium album
gcaaattgaggcctgtaccgtccaagcccactgacctccctttctttgaccttatgagcttccctggcaagattaggtctggactcggtgctcttggcttacgtccttctcctccagctcacgaggaatctgttgaagattttgtccgtcgtaatctgggctgatgaagtatttgaacgcttgattgaacccttttgttc

SEQ ID NO: 748 - DNA, 200 bp, Chenopodium album
ttggacggtacaggcctcaatttgccattccacaacacaaaacgaggggcgttaggatctccaaacaccaattcatctttcaatccactgtcaacagccatggtgagcactgcatcagatggctggaagctgttaggtccctcttcccagatatagccatcggcctccacagtagtgatgtttccaccaactcgatcttt

SEQ ID NO: 749 - DNA, 200 bp, Chenopodium album
aaagatcgagttggtggaaacatcactactgtggaggccgatggctatatctgggaagagggacctaacagcttccagccatctgatgcagtgctcaccatggctgttgacagtggattgaaagatgaattggtgtttggagatcctaacgcccctcgttttgtgttgtggaatggcaaattgaggcctgtaccgtccaa

SEQ ID NO: 750 - DNA, 200 bp, Chenopodium album
tgatgtttccaccaactcgatctttagcctccgtgacaatgaaatttggggagcgggaggagtattttgtagagagagcttgtgcaatgccaagaccactgattccaccacccacaatcacacagtcaagtacttcagcgccatcgattccaacagtagcagtgtttgtgttctggtaattgactgctgaatttgaggtc

SEQ ID NO: 751 - DNA, 200 bp, Chenopodium album
gacctcaaattcagcagtcaattaccagaacacaaacactgctactgttggaatcgatggcgctgaagtacttgactgtgtgattgtgggtggtggaatcagtggtcttggcattgcacaagctctctctacaaaatactcctcccgctccccaaatttcattgtcacggaggctaaagatcgagttggtggaaacatca

SEQ ID NO: 752 - DNA, 200 bp, Commelina diffusa
aattttcttgtgttatgggggaaaaaatctatattgtcataaagagaaaaaaaaattgaatatacaaaccacaacaattagattgctttttccctactatatggggttagctatatgaatcttagtttgcattttttcttatctaaaaaccatttctttagatggccctagataagacagtcaccttttaggacttcgtg

SEQ ID NO: 753 - DNA, 200 bp, Commelina diffusa
cacgaagtcctaaaaggtgactgtcttatctagggccatctaaagaaatggtttttagataagaaaaaatgcaaactaagattcatatagctaaccccatatagtagggaaaaagcaatctaattgttgtggtttgtatattcaatttttttttctctttatgacaatatagattttttcccccataacacaagaaaatt

SEQ ID NO: 754 - DNA, 200 bp, Commelina diffusa
gacagtcaccttttaggacttcgtgaagtgacttttttttttggttatataccatggttgcaagtctcagccaataccaatacgtatcatgtatcgagatcggtagctactgttataggatcgacatagtatcttggattgacatttgcttgttggctggctggccaattttggccagagaatggtaggagttggccggt

SEQ ID NO: 755 - DNA, 200 bp, Commelina diffusa
accggccaactcctaccattctctggccaaaattggccagccagccaacaagcaaatgtcaatccaagatactatgtcgatcctataacagtagctaccgatctcgatacatgatacgtattggtattggctgagacttgcaaccatggtatataaccaaaaaaaaaagtcacttcacgaagtcctaaaaggtgactgtc

SEQ ID NO: 756 - DNA, 200 bp, Commelina diffusa
cagagaatggtaggagttggccggtacgaccgtaacggtgtcaatttcacttggtatcagccaatatcgatcattatgagctctgacaccgttgatattgtattgaaaattaaaatttctattttagaaagttaaatttttattagtttatttatttcttgttaactaatattatcaatattgatacgtatcagatttga

SEQ ID NO: 757 - DNA, 200 bp, Commelina diffusa
tcaaatctgatacgtatcaatattgataatattagttaacaagaaataaataaactaataaaaatttaactttctaaaatagaaattttaattttcaatacaatatcaacggtgtcagagctcataatgatcgatattggctgataccaagtgaaattgacaccgttacggtcgtaccggccaactcctaccattctctg

SEQ ID NO: 758 - DNA, 200 bp, Commelina diffusa
caatattgatacgtatcagatttgaggaaacagatttgcagtcctggtctaaacctctaccctgtgtacgactaccgaaatctagtattgtaacttttctaacaggtgcatctactatctatagaacgtctacaaacacgtacaaactgctgtaaaggattttttcctaaacttgttattaatatgagtcacctatagtt

SEQ ID NO: 759 - DNA, 200 bp, Commelina diffusa
aactataggtgactcatattaataacaagtttaggaaaaaatcctttacagcagtttgtacgtgtttgtagacgttctatagatagtagatgcacctgttagaaaagttacaatactagatttcggtagtcgtacacagggtagaggtttagaccaggactgcaaatctgtttcctcaaatctgatacgtatcaatattg

SEQ ID NO: 760 - DNA, 200 bp, Commelina diffusa
ttattaatatgagtcacctatagttttccttgcacatacttgtttggagttgatctttcctagtgacacctaacttccacctcaacgttcttatctgtgctagacgcactgtttgggtatcttgcttcttaagagcccattattttcataaatcattgtagacctaataccaattttatacaatttacccttagatttaa

SEQ ID NO: 761 - DNA, 200 bp, Commelina diffusa
ttaaatctaagggtaaattgtataaaattggtattaggtctacaatgatttatgaaaataatgggctcttaagaagcaagatacccaaacagtgcgtctagcacagataagaacgttgaggtggaagttaggtgtcactaggaaagatcaactccaaacaagtatgtgcaaggaaaactataggtgactcatattaataa

SEQ ID NO: 762 - DNA, 200 bp, Commelina diffusa
ttatacaatttacccttagatttaagagactctacaatcacataacattcatgaagtttcttgccattttaaccatcttgttttaatgctattaataatatcttctatattttctctattatcttgaataatggacacaagatacataagttttttatttctaaccaactatactccatctaacataacaaattaatttg

SEQ ID NO: 763 - DNA, 200 bp, Commelina diffusa
caaattaatttgttatgttagatggagtatagttggttagaaataaaaaacttatgtatcttgtgtccattattcaagataatagagaaaatatagaagatattattaatagcattaaaacaagatggttaaaatggcaagaaacttcatgaatgttatgtgattgtagagtctcttaaatctaagggtaaattgtataa

SEQ ID NO: 764 - DNA, 200 bp, Commelina diffusa
ccatctaacataacaaattaatttgttcttgtcctactattaatatttcgtttcatatattttgttttaactctacttcatttaaaactaaaattacatgctggaactgaggttctaatcttaagttaacaccttctgctctctcatcatataaaacttctcaacaaaaaatttatgccaaggaatatcattctagatat

SEQ ID NO: 765 - DNA, 200 bp, Commelina diffusa
atatctagaatgatattccttggcataaattttttgttgagaagttttatatgatgagagagcagaaggtgttaacttaagattagaacctcagttccagcatgtaattttagttttaaatgaagtagagttaaaacaaaatatatgaaacgaaatattaatagtaggacaagaacaaattaatttgttatgttagatgg

SEQ ID NO: 766 - DNA, 200 bp, Commelina diffusa
tgccaaggaatatcattctagatatgccaaagtcaatagaagatatgaatttaaagaaccttggtggactcctattgtgataggagatctattgaactttcttacttatttttaattatgtcttatatctactagaaaccatttgcttttctaagatctaccaaagaacatccataggtattctatcatatgcattttct

SEQ ID NO: 767 - DNA, 200 bp, Commelina diffusa
agaaaatgcatatgatagaatacctatggatgttctttggtagatcttagaaaagcaaatggtttctagtagatataagacataattaaaaataagtaagaaagttcaatagatctcctatcacaataggagtccaccaaggttctttaaattcatatcttctattgactttggcatatctagaatgatattccttggca

SEQ ID NO: 768 - DNA, 200 bp, Commelina diffusa
aggtattctatcatatgcattttctgagtcaataagaaccatatacatgtctttgttcctatttctaagcgtttgtactaattgccttgataaactgatagtggtaggtataaatccaaaatgattattagaaatattagtttcacatcttagtcgttgttctgtcactattcttttcctactttcatcttcctaagagc

SEQ ID NO: 769 - DNA, 200 bp, Commelina diffusa
gctcttaggaagatgaaagtaggaaaagaatagtgacagaacaacgactaagatgtgaaactaatatttctaataatcattttggatttatacctaccactatcagtttatcaaggcaattagtacaaacgcttagaaataggaacaaagacatgtatatggttcttattgactcagaaaatgcatatgatagaatacct

SEQ ID NO: 770 - DNA, 200 bp, Commelina diffusa
ttcctactttcatcttcctaagagcatcttttacttcacaagtcctgatgttttgaatataagtagttctttttttttttaattagtggaatttacctgtaaaactatgtctagcaaggctctctccaagtgtaactttataatcctcataaatcctctgatcaccatttctagtgagaaaaggaaatcaatttggcccc

SEQ ID NO: 771 - DNA, 200 bp, Commelina diffusa
ggggccaaattgatttccttttctcactagaaatggtgatcagaggatttatgaggattataaagttacacttggagagagccttgctagacatagttttacaggtaaattccactaattaaaaaaaaaaagaactacttatattcaaaacatcaggacttgtgaagtaaaagatgctcttaggaagatgaaagtaggaa

SEQ ID NO: 772 - DNA, 200 bp, Commelina diffusa
gagaaaaggaaatcaatttggcccctactagaactatccttaaaagtaattaaatgacagtctctctttccatatagaataatgattaccaccgtattgtacgataaagcagattctaaaattttgacctttacattattcatctccccatacccataatcaccacaagtaaacttaattttcctactatcttttgccta

SEQ ID NO: 773 - DNA, 200 bp, Commelina diffusa
taggcaaaagatagtaggaaaattaagtttacttgtggtgattatgggtatggggagatgaataatgtaaaggtcaaaattttagaatctgctttatcgtacaatacggtggtaatcattattctatatggaaagagagactgtcatttaattacttttaaggatagttctagtaggggccaaattgatttccttttctc

SEQ ID NO: 774 - DNA, 200 bp, Commelina diffusa
taattttcctactatcttttgcctacgtgtcatggatgagtaccaggggaggaggagaggacaggggaaaaaggaacaaaatggaatcaaaataaaataaaatgctcatgccaacaataatgtggctaaaatcggacggaaaactaccgatggaagtttttgcagcatttaatgaaatgttaagtgtatttgctatttca

SEQ ID NO: 775 - DNA, 200 bp, Commelina diffusa
tgaaatagcaaatacacttaacatttcattaaatgctgcaaaaacttccatcggtagttttccgtccgattttagccacattattgttggcatgagcattttattttattttgattccattttgttcctttttcccctgtcctctcctcctcccctggtactcatccatgacacgtaggcaaaagatagtaggaaaatta

SEQ ID NO: 776 - DNA, 200 bp, Commelina diffusa
aatgttaagtgtatttgctatttcaaaaaaactcaattattttttattgttttggcaaaggtttagattttatctgcatttaactcttataaaacattatgaaatgatatttgttatcgactttcttgcactttcatgtgctaagcgtgtcacaactgctgaatgctactatgcaggaacaatatatagctcatcccttt

SEQ ID NO: 777 - DNA, 200 bp, Commelina diffusa
aaagggatgagctatatattgttcctgcatagtagcattcagcagttgtgacacgcttagcacatgaaagtgcaagaaagtcgataacaaatatcatttcataatgttttataagagttaaatgcagataaaatctaaacctttgccaaaacaataaaaaataattgagtttttttgaaatagcaaatacacttaacatt

SEQ ID NO: 778 - DNA, 200 bp, Commelina diffusa
ggaacaatatatagctcatccctttttcctggccgagctccccaagggagaatattgcttcttaactacattggaggtgctacaaatactggaattgtatcaaaggtgttggaacttgaccatttttcagtttttgtgaagttgcaaaaagttatatcctctacgaaaacatatgcagcttaggctatccataatatata

SEQ ID NO: 779 - DNA, 200 bp, Commelina diffusa
tatatattatggatagcctaagctgcatatgttttcgtagaggatataactttttgcaacttcacaaaaactgaaaaatggtcaagttccaacacctttgatacaattccagtatttgtagcacctccaatgtagttaagaagcaatattctcccttggggagctcggccaggaaaaagggatgagctatatattgttcc

SEQ ID NO: 780 - DNA, 200 bp, Commelina diffusa
cagcttaggctatccataatatataatccatttttaattagtgaaaacatatttcctaggaaacctcaattaaaatgtcatccattatgtctacaattgatactttattttgtttgctcttcttttccagacagtttttctagcatttacaccatgttgccactaggaatattgagtttggactggtttttccattcatt

SEQ ID NO: 781 - DNA, 200 bp, Commelina diffusa
aatgaatggaaaaaccagtccaaactcaatattcctagtggcaacatggtgtaaatgctagaaaaactgtctggaaaagaagagcaaacaaaataaagtatcaattgtagacataatggatgacattttaattgaggtttcctaggaaatatgttttcactaattaaaaatggattatatattatggatagcctaagctg

SEQ ID NO: 782 - DNA, 200 bp, Commelina diffusa
gtttggactggtttttccattcattggctaaaattttgtctatttcatttaaacatggagaggatgttgcaaacaccttctagatgtttgaattatcaaatcgttcataaagattttaagtcccaactaatatatgatgctgatttttcaagttttttttatgtgcagaatgagagcgaactggtagaagcagttgatcg

SEQ ID NO: 783 - DNA, 200 bp, Commelina diffusa
cgatcaactgcttctaccagttcgctctcattctgcacataaaaaaaacttgaaaaatcagcatcatatattagttgggacttaaaatctttatgaacgatttgataattcaaacatctagaaggtgtttgcaacatcctctccatgtttaaatgaaatagacaaaattttagccaatgaatggaaaaaccagtccaaac

SEQ ID NO: 784 - DNA, 200 bp, Commelina diffusa
gcgaactggtagaagcagttgatcgtgaccttagaaagatgctgataaagccaactgctgaggatcctcttcttgttggtgtaagagtatggccacaagctataccccagttcctggttggtcatcttgaccatctcgaggcagctaatgaagccctcaggaaaggaggttttggtggattttttcttggtggcaactat

SEQ ID NO: 785 - DNA, 200 bp, Commelina diffusa
atagttgccaccaagaaaaaatccaccaaaacctcctttcctgagggcttcattagctgcctcgagatggtcaagatgaccaaccaggaactggggtatagcttgtggccatactcttacaccaacaagaagaggatcctcagcagttggctttatcagcatctttctaaggtcacgatcaactgcttctaccagttcgc

SEQ ID NO: 786 - DNA, 200 bp, Commelina diffusa
ccatgctctaatagcttgtccgtcgtaatcttgggaatgaggtttttgaacgattgattgagccattctgttcaggtgcgcacaattcaattttcgctatgataagcaaaaaggtttttcacatgataattacctttgtttttttcttttggtgattaacatgcttttgtttgtaatgtcatatatatactatgttttac

SEQ ID NO: 787 - DNA, 200 bp, Commelina diffusa
gtaaaacatagtatatatatgacattacaaacaaaagcatgttaatcaccaaaagaaaaaaacaaaggtaattatcatgtgaaaaacctttttgcttatcatagcgaaaattgaattgtgcgcacctgaacagaatggctcaatcaatcgttcaaaaacctcattcccaagattacgacggacaagctattagagcatgg

SEQ ID NO: 788 - DNA, 200 bp, Commelina diffusa
atgtcatatatatactatgttttacctagatatttgttttgaatttttttttcttctggatttttagttttctgcgttctttactccaaattgaatcagtttgtcataactgttatggcaattgttttgatcatgtttttaaaggagtctccctgttttatcatctagcttaggagtaccaaaatgagcatttatgttct

SEQ ID NO: 789 - DNA, 200 bp, Commelina diffusa
agaacataaatgctcattttggtactcctaagctagatgataaaacagggagactcctttaaaaacatgatcaaaacaattgccataacagttatgacaaactgattcaatttggagtaaagaacgcagaaaactaaaaatccagaagaaaaaaaaattcaaaacaaatatctaggtaaaacatagtatatatatgacat

SEQ ID NO: 790 - DNA, 200 bp, Commelina diffusa
gtaccaaaatgagcatttatgttctctagaagttataggataagaaagacaggtgagaccttctggactgatttcacctaaaaaaatgctaaatctgcaggggtatatgctggagatcctacaaaacttagtatgaaggcagcttttggtaaagtatggaagttagaacagactggtggaagtattattgggggcactat

SEQ ID NO: 791 - DNA, 200 bp, Commelina diffusa
atagtgcccccaataatacttccaccagtctgttctaacttccatactttaccaaaagctgccttcatactaagttttgtaggatctccagcatatacccctgcagatttagcatttttttaggtgaaatcagtccagaaggtctcacctgtctttcttatcctataacttctagagaacataaatgctcattttggtac

SEQ ID NO: 792 - DNA, 200 bp, Commelina diffusa
gtggaagtattattgggggcactattaagacaatccaagatcaaaagaaaaatcccaaacctcctagagatccgtaagaatttcatgaaccaaattgggtttccatactacctgattgaaagtaatgaagtatccttgagttaattgttgctatttatcagacgcctaccaacaccaaaaggacaaacagttgcatcttt

SEQ ID NO: 793 - DNA, 200 bp, Commelina diffusa
aaagatgcaactgtttgtccttttggtgttggtaggcgtctgataaatagcaacaattaactcaaggatacttcattactttcaatcaggtagtatggaaacccaatttggttcatgaaattcttacggatctctaggaggtttgggatttttcttttgatcttggattgtcttaatagtgcccccaataatacttccac

SEQ ID NO: 794 - DNA, 200 bp, Commelina diffusa
caaaaggacaaacagttgcatcttttaggaaagggcttaacatgctacctgcagcaatttcttccaggtctttgttttttttcattctttgtaataccctgtaactatctgcaggcttttacaaactggttatactttttttttactttaccaagttggttagttagtagttatatttatgtgttcatactgaagatgag

SEQ ID NO: 795 - DNA, 200 bp, Commelina diffusa
ctcatcttcagtatgaacacataaatataactactaactaaccaacttggtaaagtaaaaaaaaagtataaccagtttgtaaaagcctgcagatagttacagggtattacaaagaatgaaaaaaaacaaagacctggaagaaattgctgcaggtagcatgttaagccctttcctaaaagatgcaactgtttgtccttttg

SEQ ID NO: 796 - DNA, 200 bp, Commelina diffusa
tttatgtgttcatactgaagatgagcaacttctgttttttatcataattatatttatatatttcttttgttatctatcaaggattatccttcagatctaacagttcacaaacttcactagcttgtatcttggaacatattttctttactttaatattttcattgacttgtatttcgtggaaaaacagactgggtagcaaa

SEQ ID NO: 797 - DNA, 200 bp, Commelina diffusa
tttgctacccagtctgtttttccacgaaatacaagtcaatgaaaatattaaagtaaagaaaatatgttccaagatacaagctagtgaagtttgtgaactgttagatctgaaggataatccttgatagataacaaaagaaatatataaatataattatgataaaaaacagaagttgctcatcttcagtatgaacacataaa

SEQ ID NO: 798 - DNA, 200 bp, Commelina diffusa
gtggaaaaacagactgggtagcaaagtgaaactatcatggaaacttgtgagcatcaggaagctggagagccaggaatatttattgctatatgaaacatcagaaggattgacttcagtacagactagaagtgttgttctgactgttccatcttatattgccagcaatctccttcgctctctttcagtaagcttatgcccca

SEQ ID NO: 799 - DNA, 200 bp, Commelina diffusa
tggggcataagcttactgaaagagagcgaaggagattgctggcaatataagatggaacagtcagaacaacacttctagtctgtactgaagtcaatccttctgatgtttcatatagcaataaatattcctggctctccagcttcctgatgctcacaagtttccatgatagtttcactttgctacccagtctgtttttccac

SEQ ID NO: 800 - DNA, 200 bp, Commelina diffusa
tctctttcagtaagcttatgccccactttaagcttctacagtccctttgaatatgtttatggaattctgttataaagaccttctcggttgctttttctgtagttaatttatgtggatggagaatctttctagaaattgttgacatgatactatatatggtatctatattgtgtgacatgttattgttgaccaatatatgc

SEQ ID NO: 801 - DNA, 200 bp, Commelina diffusa
gcatatattggtcaacaataacatgtcacacaatatagataccatatatagtatcatgtcaacaatttctagaaagattctccatccacataaattaactacagaaaaagcaaccgagaaggtctttataacagaattccataaacatattcaaagggactgtagaagcttaaagtggggcataagcttactgaaagaga

SEQ ID NO: 802 - DNA, 200 bp, Commelina diffusa
gctatatgaaacatcagaaggattgacttcagtacagactagaagtgttgttctgactgttccatcttatattgccagcaatctccttcgctctctttcaaatgacgcagctgatgctttgtcaaagttttactatcctccagttgctgctgtttccatttcatatccaaaggaagctattaggaacgaatgtttaatcg

SEQ ID NO: 803 - DNA, 200 bp, Commelina diffusa
cgattaaacattcgttcctaatagcttcctttggatatgaaatggaaacagcagcaactggaggatagtaaaactttgacaaagcatcagctgcgtcatttgaaagagagcgaaggagattgctggcaatataagatggaacagtcagaacaacacttctagtctgtactgaagtcaatccttctgatgtttcatatagc

SEQ ID NO: 804 - DNA, 200 bp, Commelina diffusa
gctattaggaacgaatgtttaatcgatggtgagcttaagggatttggccagttgcatccacgtagtcaaggagtagagacactcggaacaatatatagctcatcccttttcctggccgagctccccaagggagaatattgcttcttaactacattggaggtgctacaaatactggaattgtatcaaagaatgagagcgaa

SEQ ID NO: 805 - DNA, 200 bp, Commelina diffusa
ttcgctctcattctttgatacaattccagtatttgtagcacctccaatgtagttaagaagcaatattctcccttggggagctcggccaggaaaagggatgagctatatattgttccgagtgtctctactccttgactacgtggatgcaactggccaaatcccttaagctcaccatcgattaaacattcgttcctaatagc

SEQ ID NO: 806 - DNA, 200 bp, Commelina diffusa
ttatgattaaagatatatatatccaattagtttacttccacattgcataatgtaccttgatatatatttcctactagcattttttccttaaaattacgatttttgtatgattatcagattaacaacactagcggcctcttttatattgatcctagtggaaggaggatattcctcctaatttgttgtactaagacatcggc

SEQ ID NO: 807 - DNA, 200 bp, Commelina diffusa
gccgatgtcttagtacaacaaattaggaggaatatcctccttccactaggatcaatataaaagaggccgctagtgttgttaatctgataatcatacaaaaatcgtaattttaaggaaaaaatgctagtaggaaatatatatcaaggtacattatgcaatgtggaagtaaactaattggatatatatatctttaatcataa

SEQ ID NO: 808 - DNA, 200 bp, Commelina diffusa
taatttgttgtactaagacatcggctacatttttttttttgcttatggagacatctatattaatatttgtggttcacatgattcttgttgcttaaagattatttaatggatggtggttgcagaatgacgcagctgatgctttgtcaaagttttactatcctccagttgctgctgtttccatttcatatccaaaggaagct

SEQ ID NO: 809 - DNA, 200 bp, Commelina diffusa
agcttcctttggatatgaaatggaaacagcagcaactggaggatagtaaaactttgacaaagcatcagctgcgtcattctgcaaccaccatccattaaataatctttaagcaacaagaatcatgtgaaccacaaatattaatatagatgtctccataagcaaaaaaaaaaatgtagccgatgtcttagtacaacaaatta

SEQ ID NO: 810 - DNA, 200 bp, Commelina diffusa
ttccatttcatatccaaaggaagctattaggaacgaatgtttaatcgatggtgagcttaagggatttggccagttgcatccacgtagtcaaggagtagagacactcggtactgttctgtcttgtttatggccccacactactcaccccaaatataatataggttctatatgtatatgctctctggatttccatttgcaat

SEQ ID NO: 811 - DNA, 200 bp, Commelina diffusa
attgcaaatggaaatccagagagcatatacatatagaacctatattatatttggggtgagtagtgtggggccataaacaagacagaacagtaccgagtgtctctactccttgactacgtggatgcaactggccaaatcccttaagctcaccatcgattaaacattcgttcctaatagcttcctttggatatgaaatggaa

SEQ ID NO: 812 - DNA, 200 bp, Conyza canadensis
aaaagtatatttaaaattttttgcccacaccaaaaaaaattttaaaaaaaagaagtacatatgcaatcaatgacatgcgatttcaatcccaactttcaaatctcaatttttaaatgctagtagctataagtaaataatctccattctccttctctatacatcttttcttattcaacaggtaatactttcatttattaatc

SEQ ID NO: 813 - DNA, 200 bp, Conyza canadensis
gattaataaatgaaagtattacctgttgaataagaaaagatgtatagagaaggagaatggagattatttacttatagctactagcatttaaaaattgagatttgaaagttgggattgaaatcgcatgtcattgattgcatatgtacttcttttttttaaaattttttttggtgtgggcaaaaaattttaaatatactttt

SEQ ID NO: 814 - DNA, 200 bp, Conyza canadensis
caggtaatactttcatttattaatcataaaattatacatatatattttccctaatttttaggtttcttaatttcttttgacgtgaattgaaagatgaaaacgtgatgatagattggaagagttgaagaggggttttgttttggggaatctcatacataacacactaaacaacatattatcagttatcttgtattgattta

SEQ ID NO: 815 - DNA, 200 bp, Conyza canadensis
taaatcaatacaagataactgataatatgttgtttagtgtgttatgtatgagattccccaaaacaaaacccctcttcaactcttccaatctatcatcacgttttcatctttcaattcacgtcaaaagaaattaagaaacctaaaaattagggaaaatatatatgtataattttatgattaataaatgaaagtattacctg

SEQ ID NO: 816 - DNA, 200 bp, Conyza canadensis
ttatcagttatcttgtattgatttaatataaaatatgagtactaaaataccattatatggatcgtataagtttagtgaatagttcgtgcttttggttatacgacgaaattgtagttggtttattatatcgtcttttgagtttgcattttggttgtaattggatggttattattttgtgggtatatgaatttattggaatt

SEQ ID NO: 817 - DNA, 200 bp, Conyza canadensis
aattccaataaattcatatacccacaaaataataaccatccaattacaaccaaaatgcaaactcaaaagacgatataataaaccaactacaatttcgtcgtataaccaaaagcacgaactattcactaaacttatacgatccatataatggtattttagtactcatattttatattaaatcaatacaagataactgataa

SEQ ID NO: 818 - DNA, 200 bp, Conyza canadensis
gtgggtatatgaatttattggaatttgatcgatatattaaaatttttgtacctatataatgttttaaatttgtcaccttacgataaagttcctggctccgccttgatagcagccttcatgtaaaattggttttcataaacgttctgagtttttataaattttgtaacatgtcattcttctggaaatatgcttctcttcaa

SEQ ID NO: 819 - DNA, 200 bp, Conyza canadensis
ttgaagagaagcatatttccagaagaatgacatgttacaaaatttataaaaactcagaacgtttatgaaaaccaattttacatgaaggctgctatcaaggcggagccaggaactttatcgtaaggtgacaaatttaaaacattatataggtacaaaaattttaatatatcgatcaaattccaataaattcatatacccac

SEQ ID NO: 820 - DNA, 200 bp, Conyza canadensis
cttctggaaatatgcttctcttcaatttaacgcgtatatgagcgttgcattcgcatataatcgaatgtctcgtggaaagtactaaagacttggccaacgttaggtttcattatcatcttctaggggattgtttaagtccaacataattaagaatttacaaacagaaggaacaacgtaggaaaagtcataatcaattgaat

SEQ ID NO: 821 - DNA, 200 bp, Conyza canadensis
attcaattgattatgacttttcctacgttgttccttctgtttgtaaattcttaattatgttggacttaaacaatcccctagaagatgataatgaaacctaacgttggccaagtctttagtactttccacgagacattcgattatatgcgaatgcaacgctcatatacgcgttaaattgaagagaagcatatttccagaag

SEQ ID NO: 822 - DNA, 200 bp, Conyza canadensis
taggaaaagtcataatcaattgaatagtttgattagtcaatttatcagtacttaaactaagatatagtaagatgaggttgaaaaacaactactataacatacaaacatatatggatcttccttaaataataacaatgttaaagattactgcaaaaattacagaccttcattttcagcaatgatggtatgaagttgaaata

SEQ ID NO: 823 - DNA, 200 bp, Conyza canadensis
tatttcaacttcataccatcattgctgaaaatgaaggtctgtaatttttgcagtaatctttaacattgttattatttaaggaagatccatatatgtttgtatgttatagtagttgtttttcaacctcatcttactatatcttagtttaagtactgataaattgactaatcaaactattcaattgattatgacttttccta

SEQ ID NO: 824 - DNA, 200 bp, Conyza canadensis
gcaatgatggtatgaagttgaaataatcgtttgttgttttcaattaacattttttcacaaagggagagagataaatatggtgatcagctttatatttcaatataatgtgaaaggtctgaaaaaaaaatttgaccaagtgtaaaaaatatgttttggataaataaaagttaatttaaataatctactaaaattagcccctg

SEQ ID NO: 825 - DNA, 200 bp, Conyza canadensis
caggggctaattttagtagattatttaaattaacttttatttatccaaaacatattttttacacttggtcaaatttttttttcagacctttcacattatattgaaatataaagctgatcaccatatttatctctctccctttgtgaaaaaatgttaattgaaaacaacaaacgattatttcaacttcataccatcattgc

SEQ ID NO: 826 - DNA, 200 bp, Conyza canadensis
aataatctactaaaattagcccctggtttacaaatatcatttcacttataatttattaaccataatttactaatttgttcagtcaaacttttttttttatatagtttctttatttaacgtactcacaacacattacaatctctcatattgggtatttttactgctgcattacgtgagtttttttttattgtatcatataa

SEQ ID NO: 827 - DNA, 200 bp, Conyza canadensis
ttatatgatacaataaaaaaaaactcacgtaatgcagcagtaaaaatacccaatatgagagattgtaatgtgttgtgagtacgttaaataaagaaactatataaaaaaaaaagtttgactgaacaaattagtaaattatggttaataaattataagtgaaatgatatttgtaaaccaggggctaattttagtagattatt

SEQ ID NO: 828 - DNA, 200 bp, Conyza canadensis
agtttttttttattgtatcatataatttttgacaaatgatttttaataaaacaaaccttttcactctttaatggtgaggtttcaattccacagtttaatcaattgccgatcgatgtatatatgtaatttttagttttaatttagtaaatacaaaattatttaactagggtataggaagagtagacttgaaaatatgggtg

SEQ ID NO: 829 - DNA, 200 bp, Conyza canadensis
cacccatattttcaagtctactcttcctataccctagttaaataattttgtatttactaaattaaaactaaaaattacatatatacatcgatcggcaattgattaaactgtggaattgaaacctcaccattaaagagtgaaaaggtttgttttattaaaaatcatttgtcaaaaattatatgatacaataaaaaaaaact

SEQ ID NO: 830 - DNA, 200 bp, Conyza canadensis
aagagtagacttgaaaatatgggtgataatttcttgattctttcaatttgagtaagttaaagaaatcttaactcttcaaattttggcctttaatttatatctaaaggttaatttttatctaaaggttaacattactataacttggactaattccctccctaaaaatatatacccattttccttatctgacttggaaaata

SEQ ID NO: 831 - DNA, 200 bp, Conyza canadensis
tattttccaagtcagataaggaaaatgggtatatatttttagggagggaattagtccaagttatagtaatgttaacctttagataaaaattaacctttagatataaattaaaggccaaaatttgaagagttaagatttctttaacttactcaaattgaaagaatcaagaaattatcacccatattttcaagtctactctt

SEQ ID NO: 832 - DNA, 200 bp, Conyza canadensis
ttttccttatctgacttggaaaatagtggggtagatcggatctgacctaacctgatttgacccgatccgacccgaacgttgaaaatgaaaattagtttactagaggtggttcacccacagagaaattataccaaaccgaaacaacccaacaatggcttctccaacaacaacaacagatgataacaaaggtagatactatt

SEQ ID NO: 833 - DNA, 200 bp, Conyza canadensis
aatagtatctacctttgttatcatctgttgttgttgttggagaagccattgttgggttgtttcggtttggtataatttctctgtgggtgaaccacctctagtaaactaattttcattttcaacgttcgggtcggatcgggtcaaatcaggttaggtcagatccgatctaccccactattttccaagtcagataaggaaaa

SEQ ID NO: 834 - DNA, 200 bp, Conyza canadensis
gatgataacaaaggtagatactatttctttttcttcttaataatcttaatatgttattattttcattgtagataatccagttctgcattttgttgcacagagaaagcacctgctaagagagttgcagttgttggcgccggtgtcaggtcaatgttactactttcatatatataatatatgtatcttgcgttttattttac

SEQ ID NO: 835 - DNA, 200 bp, Conyza canadensis
gtaaaataaaacgcaagatacatatattatatatatgaaagtagtaacattgacctgacaccggcgccaacaactgcaactctcttagcaggtgctttctctgtgcaacaaaatgcagaactggattatctacaatgaaaataataacatattaagattattaagaagaaaaagaaatagtatctacctttgttatcatc

SEQ ID NO: 836 - DNA, 200 bp, Conyza canadensis
atatgtatcttgcgttttattttacttcttactttttacggcgaaatacccaaatatcccaccccacggaaggttatgtagactttggttttctttgacctctatagttggttacttgttatggccatgaaatgaaagattcctaaacgagggtggagattactctagcgtttgttttgaccccaaaaatgctttgcttg

SEQ ID NO: 837 - DNA, 200 bp, Conyza canadensis
caagcaaagcatttttggggtcaaaacaaacgctagagtaatctccaccctcgtttaggaatctttcatttcatggccataacaagtaaccaactatagaggtcaaagaaaaccaaagtctacataaccttccgtggggtgggatatttgggtatttcgccgtaaaaagtaagaagtaaaataaaacgcaagatacatat

SEQ ID NO: 838 - DNA, 200 bp, Conyza canadensis
tttgaccccaaaaatgctttgcttgtcggaggacatgaccaatatttagaggactaggattagcttagcggaatatggtagataagtaatccttttaggggtactttatataattgtggattttcatgcatgatacctttcttatatgctcatatgacttctttgcactgttaggggtagtgttcttgacagctaggtga

SEQ ID NO: 839 - DNA, 200 bp, Conyza canadensis
tcacctagctgtcaagaacactacccctaacagtgcaaagaagtcatatgagcatataagaaaggtatcatgcatgaaaatccacaattatataaagtacccctaaaaggattacttatctaccatattccgctaagctaatcctagtcctctaaatattggtcatgtcctccgacaagcaaagcatttttggggtcaaa

SEQ ID NO: 840 - DNA, 200 bp, Conyza canadensis
ggtagtgttcttgacagctaggtgacctatgctactttgtttcataggtcgattagggattagcacccactatttttttatttttttggaaggcattaaattatattatattaaagataaaaattgccagtaagaaactagccgatacatagactgtccaatccaaaatagaaaactagcacccacattatatgtgggcc

SEQ ID NO: 841 - DNA, 200 bp, Conyza canadensis
ggcccacatataatgtgggtgctagttttctattttggattggacagtctatgtatcggctagtttcttactggcaatttttatctttaatataatataatttaatgccttccaaaaaaataaaaaaatagtgggtgctaatccctaatcgacctatgaaacaaagtagcataggtcacctagctgtcaagaacactacc

SEQ ID NO: 842 - DNA, 200 bp, Conyza canadensis
ctagcacccacattatatgtgggcccaccggtccctaggacttcctagtaaatatctacttatatctatgtatgcatggctgataccaaccctatttgcttttgtgacttgctgggaggaggttaaaggggttcttgacttcttgcacatgccactcgtactaccaaacctatttgcttctatgacttgctgggaggaga

SEQ ID NO: 843 - DNA, 200 bp, Conyza canadensis
tctcctcccagcaagtcatagaagcaaataggtttggtagtacgagtggcatgtgcaagaagtcaagaacccctttaacctcctcccagcaagtcacaaaagcaaatagggttggtatcagccatgcatacatagatataagtagatatttactaggaagtcctagggaccggtgggcccacatataatgtgggtgctag

SEQ ID NO: 844 - DNA, 200 bp, Conyza canadensis
gcttctatgacttgctgggaggagacatgcccctattaattgttgctctcatcccacatgtttggttctatgcagacggttatatttattatgtttttatgatgtttaatatgttcaaatgtcttatttactatgtattgtccaatttgggctatgtggtatgtcttctacccttgtctactcttaatgtagtaagagta

SEQ ID NO: 845 - DNA, 200 bp, Conyza canadensis
tactcttactacattaagagtagacaagggtagaagacataccacatagcccaaattggacaatacatagtaaataagacatttgaacatattaaacatcataaaaacataataaatataaccgtctgcatagaaccaaacatgtgggatgagagcaacaattaataggggcatgtctcctcccagcaagtcatagaagc

SEQ ID NO: 846 - DNA, 200 bp, Conyza canadensis
gtctactcttaatgtagtaagagtatcatcatactcgatcgacaggtatggttactgaactctttacactctcctacttttgccttttttggatggaggtccttatggaagtagtctttctgcctctgggtagaggcaagactgtctacatctcacatcccccatacccctcgcacaagaattgggtcatgttgtttttg

SEQ ID NO: 847 - DNA, 200 bp, Conyza canadensis
caaaaacaacatgacccaattcttgtgcgaggggtatgggggatgtgagatgtagacagtcttgcctctacccagaggcagaaagactacttccataaggacctccatccaaaaaaggcaaaagtaggagagtgtaaagagttcagtaaccatacctgtcgatcgagtatgatgatactcttactacattaagagtagac

SEQ ID NO: 848 - DNA, 200 bp, Conyza canadensis
caagaattgggtcatgttgtttttgtggactcgaacccagatggtaagatgtttccaatggggtttacatattgttgattttttgctgctagtataatatattattttgattattcgttacatgtatgaaatttgtaaataaattggtgagtatagtagtctagtgcaacatggtgattgattgatatctagaggaatgg

SEQ ID NO: 849 - DNA, 200 bp, Conyza canadensis
ccattcctctagatatcaatcaatcaccatgttgcactagactactatactcaccaatttatttacaaatttcatacatgtaacgaataatcaaaataatatattatactagcagcaaaaaatcaacaatatgtaaaccccattggaaacatcttaccatctgggttcgagtccacaaaaacaacatgacccaattcttg

SEQ ID NO: 850 - DNA, 200 bp, Conyza canadensis
gattgattgatatctagaggaatggctggccatattatgttgaatcatgaatgaatgacttggtttgtttcagtgggcttgcggctgcatataagttaaaactacatggaataaatgtcactgtttttgaagccggtgagatagccggagggaaactaagaagcatttcacaaaacggtttaatatgggacgagggtgcc

SEQ ID NO: 851 - DNA, 200 bp, Conyza canadensis
ggcaccctcgtcccatattaaaccgttttgtgaaatgcttcttagtttccctccggctatctcaccggcttcaaaaacagtgacatttattccatgtagttttaacttatatgcagccgcaagcccactgaaacaaaccaagtcattcattcatgattcaacataatatggccagccattcctctagatatcaatcaatc

SEQ ID NO: 852 - DNA, 200 bp, Conyza canadensis
cggtttaatatgggacgagggtgccaatactatggtatgatatcgatgttagtttgcttatagacataacttctttttttttattttttttaaaaaaaagttgttttgatgctcttttactccgtatttgtagactgagagtgaaccggatgtcagcaggttgcttgatgatcttggtcttcgagataaacaacagtctg

SEQ ID NO: 853 - DNA, 200 bp, Conyza canadensis
cagactgttgtttatctcgaagaccaagatcatcaagcaacctgctgacatccggttcactctcagtctacaaatacggagtaaaagagcatcaaaacaacttttttttaaaaaaaataaaaaaaaagaagttatgtctataagcaaactaacatcgatatcataccatagtattggcaccctcgtcccatattaaaccg

SEQ ID NO: 854 - DNA, 200 bp, Conyza canadensis
ggtcttcgagataaacaacagtctgtaagttatatgctgttggatatggaacatcatgcttcctgtagcgtgcgtttgaaaatttatttttgcaaatttctcccattgtatactaaatgacatagtataaagaagaggaaattgtttatatcacttttattcgtgttcaaatacggaaggctaaatccactttatgtggc

SEQ ID NO: 855 - DNA, 200 bp, Conyza canadensis
gccacataaagtggatttagccttccgtatttgaacacgaataaaagtgatataaacaatttcctcttctttatactatgtcatttagtatacaatgggagaaatttgcaaaaataaattttcaaacgcacgctacaggaagcatgatgttccatatccaacagcatataacttacagactgttgtttatctcgaagacc

SEQ ID NO: 856 - DNA, 200 bp, Conyza canadensis
gaaggctaaatccactttatgtggctgtggctgtaataatttgtcggctatggttcttgtttcatttatttgttgtggtcatgtgtgtatatgtttaccatggctgaatactacactatatttccttttgcagccactttcccaacataagcgatatattgtaagaaatggaaaaccggtactggtatgatatctcaaca

SEQ ID NO: 857 - DNA, 200 bp, Conyza canadensis
tgttgagatatcataccagtaccggttttccatttcttacaatatatcgcttatgttgggaaagtggctgcaaaaggaaatatagtgtagtattcagccatggtaaacatatacacacatgaccacaacaaataaatgaaacaagaaccatagccgacaaattattacagccacagccacataaagtggatttagccttc

SEQ ID NO: 858 - DNA, 200 bp, Conyza canadensis
ccggtactggtatgatatctcaacaccatgctgaaaactaatcctctgttatatatgaacaaaagagtttaaaagtataagatgaaactttacttcaaaatcattagtagaaattgtgttttattggactcaaattctcaacctcataaacacttgtcatttgtttacaaagttttgtaaactgattttttgttttctgg

SEQ ID NO: 859 - DNA, 200 bp, Conyza canadensis
ccagaaaacaaaaaatcagtttacaaaactttgtaaacaaatgacaagtgtttatgaggttgagaatttgagtccaataaaacacaatttctactaatgattttgaagtaaagtttcatcttatacttttaaactcttttgttcatatataacagaggattagttttcagcatggtgttgagatatcataccagtaccgg

SEQ ID NO: 860 - DNA, 200 bp, Conyza canadensis
tgtaaactgattttttgttttctgggaatgtaaataattatggcagtttattgtactgttctttcgtatagatagttataaactcaaaacacaaaaaaaaggttgttttattacgcggtcgtagctgtcacaattttagttttcttttgtacttgccaagttcatgtcttatatactgaatgtaacttggccaaactcat

SEQ ID NO: 861 - DNA, 200 bp, Conyza canadensis
atgagtttggccaagttacattcagtatataagacatgaacttggcaagtacaaaagaaaactaaaattgtgacagctacgaccgcgtaataaaacaaccttttttttgtgttttgagtttataactatctatacgaaagaacagtacaataaactgccataattatttacattcccagaaaacaaaaaatcagtttaca

SEQ ID NO: 862 - DNA, 200 bp, Conyza canadensis
ctgaatgtaacttggccaaactcatgtctgcaggtaccttctaaccccattgcactgatccaaagcagtttgctttccactcaatcaaaggttcgttagtagctcttggatgtttaagtctgaagtatttaaaccgtatccaatcctttcattctcatattatctacccaatgattctcaatgtcaaggctcacaaaaac

SEQ ID NO: 863 - DNA, 200 bp, Conyza canadensis
gtttttgtgagccttgacattgagaatcattgggtagataatatgagaatgaaaggattggatacggtttaaatacttcagacttaaacatccaagagctactaacgaacctttgattgagtggaaagcaaactgctttggatcagtgcaatggggttagaaggtacctgcagacatgagtttggccaagttacattcag

SEQ ID NO: 864 - DNA, 200 bp, Conyza canadensis
tctcaatgtcaaggctcacaaaaactctttatcctactatgctttaaatttttaataaaaatgatgcatgcccttttcggttgtatttaaaaaattatccaaaattgcaatggtaatatattagcacacgagttacacaaattctttctcattttgatatcagatgatctcaaaattataatttgtacttcattacattg

SEQ ID NO: 865 - DNA, 200 bp, Conyza canadensis
caatgtaatgaagtacaaattataattttgagatcatctgatatcaaaatgagaaagaatttgtgtaactcgtgtgctaatatattaccattgcaattttggataattttttaaatacaaccgaaaagggcatgcatcatttttattaaaaatttaaagcatagtaggataaagagtttttgtgagccttgacattgaga

SEQ ID NO: 866 - DNA, 200 bp, Conyza canadensis
ttataatttgtacttcattacattgtgtatgtgattatggggtttgttgcaaaaattacagcttcaaatacttttggagccattttcatggaagaagaagaactcgtctgatacacaagaaaggtaatatatagccttctttcctatctatctgttaaaccctattagggactaacttttttatttatttactattttgt

SEQ ID NO: 867 - DNA, 200 bp, Conyza canadensis
acaaaatagtaaataaataaaaaagttagtccctaatagggtttaacagatagataggaaagaaggctatatattacctttcttgtgtatcagacgagttcttcttcttccatgaaaatggctccaaaagtatttgaagctgtaatttttgcaacaaaccccataatcacatacacaatgtaatgaagtacaaattataa

SEQ ID NO: 868 - DNA, 200 bp, Conyza canadensis
cttttttatttatttactattttgtagtgttggtgcattctttcaacgtcattttgggaaggaggtatatgtatattgtaacctttatcttcagttcagttattctggtatacgtctttcttttgatattaaggggtccaagttttcatttgtgtggtacttcaaaatttgtccatgctttccgctatcttaattttcta

SEQ ID NO: 869 - DNA, 200 bp, Conyza canadensis
tagaaaattaagatagcggaaagcatggacaaattttgaagtaccacacaaatgaaaacttggaccccttaatatcaaaagaaagacgtataccagaataactgaactgaagataaaggttacaatatacatatacctccttcccaaaatgacgttgaaagaatgcaccaacactacaaaatagtaaataaataaaaaag

SEQ ID NO: 870 - DNA, 200 bp, Conyza canadensis
tgctttccgctatcttaattttctatacttaatgtacatatgtaaggttgttgagtatctcattaatcctgttgttgctggaacaagcggtggagatccggagtcactttctgtgagtaactcttccatgtccatgctgcttcatattagtgtggggatatacataactgatttcaattaacaaacaaaaacactttaaa

SEQ ID NO: 871 - DNA, 200 bp, Conyza canadensis
tttaaagtgtttttgtttgttaattgaaatcagttatgtatatccccacactaatatgaagcagcatggacatggaagagttactcacagaaagtgactccggatctccaccgcttgttccagcaacaacaggattaatgagatactcaacaaccttacatatgtacattaagtatagaaaattaagatagcggaaagca

SEQ ID NO: 872 - DNA, 200 bp, Conyza canadensis
aattaacaaacaaaaacactttaaagcatgtggaggtgcaaatgcattctttgacacccctgctaagtgctacctctcatcattaaccttctaggttaatctatcaacctcatattttccatacagatgcgctattcattccctgaattatgggatttagagagaaggtatgtaagctacaaaataatatgtaattcatt

SEQ ID NO: 873 - DNA, 200 bp, Conyza canadensis
aatgaattacatattattttgtagcttacataccttctctctaaatcccataattcagggaatgaatagcgcatctgtatggaaaatatgaggttgatagattaacctagaaggttaatgatgagaggtagcacttagcaggggtgtcaaagaatgcatttgcacctccacatgctttaaagtgtttttgtttgttaatt

SEQ ID NO: 874 - DNA, 200 bp, Conyza canadensis
gctacaaaataatatgtaattcattctttaagtgagcttgattatttgttcccatgcaatctactatgattttttattataatatttataaagcttggattcttaaattcaatgtgatgacggtcaaatcaacatgcaggtttggttcactcatttctggggcatttcagtctatgatctcttctcgaggcagaaaaaag

SEQ ID NO: 875 - DNA, 200 bp, Conyza canadensis
cttttttctgcctcgagaagagatcatagactgaaatgccccagaaatgagtgaaccaaacctgcatgttgatttgaccgtcatcacattgaatttaagaatccaagctttataaatattataataaaaaatcatagtagattgcatgggaacaaataatcaagctcacttaaagaatgaattacatattattttgtagc

SEQ ID NO: 876 - DNA, 200 bp, Conyza canadensis
gatctcttctcgaggcagaaaaaagagtccttcaggaagcagcaagcgcaggcgtggctccttttcatttttaggtggaatgcaggtaagattggtgattttgtctgtcaagattcatttattggaatctaatatattctttaaagtagaaacaggccatcaatatattgcttactttgttcttttaaatctttattctc

SEQ ID NO: 877 - DNA, 200 bp, Conyza canadensis
gagaataaagatttaaaagaacaaagtaagcaatatattgatggcctgtttctactttaaagaatatattagattccaataaatgaatcttgacagacaaaatcaccaatcttacctgcattccacctaaaaatgaaaaggagccacgcctgcgcttgctgcttcctgaaggactcttttttctgcctcgagaagagatc

SEQ ID NO: 878 - DNA, 200 bp, Conyza canadensis
tttgttcttttaaatctttattctcatgcagacacttacaaatgcactgagcaaagaagttggacaacatgaacttaatcttcaatccaaggtgcttgaaatgtcctatagctgtgatgataacactactgggagttggtcgatctattgtgctccagatcagaacaaacaattaaatcagcaaccttttgatgctgtga

SEQ ID NO: 879 - DNA, 200 bp, Conyza canadensis
tcacagcatcaaaaggttgctgatttaattgtttgttctgatctggagcacaatagatcgaccaactcccagtagtgttatcatcacagctataggacatttcaagcaccttggattgaagattaagttcatgttgtccaacttctttgctcagtgcatttgtaagtgtctgcatgagaataaagatttaaaagaacaaa

SEQ ID NO: 880 - DNA, 200 bp, Conyza canadensis
aatcagcaaccttttgatgctgtgatcatgactgtgagtatagttgtgttatcttacggtgacattgacataaatttggttaatgttttgcattttgacaagactagtttgtctcagcaacttttttttgtgctatcttggtggatctggattcatcaaatattcaaatctgtggacaaaatatggaaattcttattctc

SEQ ID NO: 881 - DNA, 200 bp, Conyza canadensis
gagaataagaatttccatattttgtccacagatttgaatatttgatgaatccagatccaccaagatagcacaaaaaaaagttgctgagacaaactagtcttgtcaaaatgcaaaacattaaccaaatttatgtcaatgtcaccgtaagataacacaactatactcacagtcatgatcacagcatcaaaaggttgctgatt

SEQ ID NO: 882 - DNA, 200 bp, Conyza canadensis
acaaaatatggaaattcttattctctatttcagaaataggagaattattgtttatacacccatttgttttaatgcttattagtttgtaagtgcaattagaacgtaattaacacagtacatgctcccgaattaggccccacttggcaatgtgaaagaaatgaagattacaaagacaggaagtccgttcctgctcaatttta

SEQ ID NO: 883 - DNA, 200 bp, Conyza canadensis
taaaattgagcaggaacggacttcctgtctttgtaatcttcatttctttcacattgccaagtggggcctaattcgggagcatgtactgtgttaattacgttctaattgcacttacaaactaataagcattaaaacaaatgggtgtataaacaataattctcctatttctgaaatagagaataagaatttccatattttgt

SEQ ID NO: 884 - DNA, 200 bp, Conyza canadensis
ggaagtccgttcctgctcaattttatacctgaggtatgttattgtaccgtgtgagttctatcatatggaattcgtgcagaaccccttagttttagctcttttgaaatttaaacaataatctttaccatggggagatatcctttaaaggaatattttctggtttttataatgcagcttagttatatgccagtttcagtcat

SEQ ID NO: 885 - DNA, 200 bp, Conyza canadensis
atgactgaaactggcatataactaagctgcattataaaaaccagaaaatattcctttaaaggatatctccccatggtaaagattattgtttaaatttcaaaagagctaaaactaaggggttctgcacgaattccatatgatagaactcacacggtacaataacatacctcaggtataaaattgagcaggaacggacttcc

SEQ ID NO: 886 - DNA, 200 bp, Conyza canadensis
ttagttatatgccagtttcagtcataatctctacattcaagaaagagaatgtgaagcggccccttgagggatttggaatgcttgttcctgccaaggagcaggaaaatggtttgaagacgttaggtaaagcttgcctgtgtattatcttttttttttttttccttttcatttttttttcttttttttttctttattgtcta

SEQ ID NO: 887 - DNA, 200 bp, Conyza canadensis
tagacaataaagaaaaaaaaaagaaaaaaaaatgaaaaggaaaaaaaaaaaaaagataatacacaggcaagctttacctaacgtcttcaaaccattttcctgctccttggcaggaacaagcattccaaatccctcaaggggccgcttcacattctctttcttgaatgtagagattatgactgaaactggcatataactaa

SEQ ID NO: 888 - DNA, 200 bp, Conyza canadensis
ttcttttttttttctttattgtctataattattattgaaaattctgttatgcaggcactctcttttcttccatgatgtttccagatcgtgcccctgaagacttgtatctttataccacctttgttgggggaagtcgaaacaaagaactggccaatgcttcgaggtaggcttgatcattgcaataatttctgctcaatatt

SEQ ID NO: 889 - DNA, 200 bp, Conyza canadensis
aatattgagcagaaattattgcaatgatcaagcctacctcgaagcattggccagttctttgtttcgacttcccccaacaaaggtggtataaagatacaagtcttcaggggcacgatctggaaacatcatggaagaaaagagagtgcctgcataacagaattttcaataataattatagacaataaagaaaaaaaaaagaa

SEQ ID NO: 890 - DNA, 200 bp, Conyza canadensis
attgcaataatttctgctcaatattttagcttcaaatttactcaagtattgaggaagtagttgtataatggctgtctctaaaaacttcataagagaatcttcttgaccattccctataggaatatcaatctattatttatgatgattatgatgagtaagtaataatttagtttggaaacttttttggaggaaaggagaaa

SEQ ID NO: 891 - DNA, 200 bp, Conyza canadensis
tttctcctttcctccaaaaaagtttccaaactaaattattacttactcatcataatcatcataaataatagattgatattcctatagggaatggtcaagaagattctcttatgaagtttttagagacagccattatacaactacttcctcaatacttgagtaaatttgaagctaaaatattgagcagaaattattgcaat

SEQ ID NO: 892 - DNA, 200 bp, Conyza canadensis
aaacttttttggaggaaaggagaaatgttggagctttcttgttgctgtttaaggggagaggacataactcaagtataattcttgcaataatatatattttctgtaaatacagggatgagttgaagcagatagtaacttctgacctcagacagttgcttggagcagagggagagccacaatttttgacgtaaggacacatt

SEQ ID NO: 893 - DNA, 200 bp, Conyza canadensis
aatgtgtccttacgtcaaaaattgtggctctccctctgctccaagcaactgtctgaggtcagaagttactatctgcttcaactcatccctgtatttacagaaaatatatattattgcaagaattatacttgagttatgtcctctccccttaaacagcaacaagaaagctccaacatttctcctttcctccaaaaaagttt

SEQ ID NO: 894 - DNA, 200 bp, Conyza canadensis
acaatttttgacgtaaggacacattctagctctgctgcttttattaaacgttagtttatctagatcaaaggattgcaagaattgcattcctgagcactatacaaacaattacacaacttaattttcagcttagactttttcattggcgcatgttcaccaattgaaattgtttcttgaaatttaacttttttttaaaagcc

SEQ ID NO: 895 - DNA, 200 bp, Conyza canadensis
ggcttttaaaaaaaagttaaatttcaagaaacaatttcaattggtgaacatgcgccaatgaaaaagtctaagctgaaaattaagttgtgtaattgtttgtatagtgctcaggaatgcaattcttgcaatcctttgatctagataaactaacgtttaataaaagcagcagagctagaatgtgtccttacgtcaaaaattgt

SEQ ID NO: 896 - DNA, 200 bp, Conyza canadensis
gaaatttaacttttttttaaaagcccgaggttcacagatacttttacaatgtacaagtagcttatgcttaatttgtcttgtgtttttttgttcatgtcatacatgataatgatgtagtttaattgcagtcactattactggagcaaagcatatccattgtacgggcgtgactatggcttagttatggaagcaattgagaa

SEQ ID NO: 897 - DNA, 200 bp, Conyza canadensis
ttctcaattgcttccataactaagccatagtcacgcccgtacaatggatatgctttgctccagtaatagtgactgcaattaaactacatcattatcatgtatgacatgaacaaaaaaacacaagacaaattaagcataagctacttgtacattgtaaaagtatctgtgaacctcgggcttttaaaaaaaagttaaatttc

SEQ ID NO: 898 - DNA, 200 bp, Conyza canadensis
gcttagttatggaagcaattgagaagatggaaagagagctacctggttacttttatgcgggtaaacctttttgtgtttgaaataaagtagatatatacatatctatactcccttataaagagtattagatttcttaaaattaagcattttttttcttcctaaaatacccctacttatacataaaacctttatatatcatc

SEQ ID NO: 899 - DNA, 200 bp, Conyza canadensis
gatgatatataaaggttttatgtataagtaggggtattttaggaagaaaaaaaatgcttaattttaagaaatctaatactctttataagggagtatagatatgtatatatctactttatttcaaacacaaaaaggtttacccgcataaaagtaaccaggtagctctctttccatcttctcaattgcttccataactaagc

SEQ ID NO: 900 - DNA, 200 bp, Conyza canadensis
atacataaaacctttatatatcatcctttcccacattgtctctaatcattacacgctctcatcgaccttttatcacccttcgccaccgccctcctccaccgcctctctcgatctccaccaccgtcttccatcaccttttagccgctacaacgcgcgggcattatgctcgttttaaaaaagcaagttaaaaaggatagtag

SEQ ID NO: 901 - DNA, 200 bp, Conyza canadensis
ctactatcctttttaacttgcttttttaaaacgagcataatgcccgcgcgttgtagcggctaaaaggtgatggaagacggtggtggagatcgagagaggcggtggaggagggcggtggcgaagggtgataaaaggtcgatgagagcgtgtaatgattagagacaatgtgggaaaggatgatatataaaggttttatgtat

SEQ ID NO: 902 - DNA, 200 bp, Conyza canadensis
aaaagcaagttaaaaaggatagtaggttgataagaatgactaaatgaggacaaatctattaggtaaccacaaaggaggacttgcagttggaaaagcaatatcctctggatgcgaagcagccgaatctgtgatttcatatttggattcatattccgatgagaagcgttgctagatgttgtggtaatactatttatgataca

SEQ ID NO: 903 - DNA, 200 bp, Conyza canadensis
tgtatcataaatagtattaccacaacatctagcaacgcttctcatcggaatatgaatccaaatatgaaatcacagattcggctgcttcgcatccagaggatattgcttttccaactgcaagtcctcctttgtggttacctaatagatttgtcctcatttagtcattcttatcaacctactatcctttttaacttgctttt

SEQ ID NO: 904 - DNA, 200 bp, Conyza canadensis
ttgtggtaatactatttatgatacaaaaatgaatgaaattctgagcctgaaccatataatcctgcattttcttaattattattcaaagtgcaagacttttcaggtacgtgtacatctcaagaagttttctttccatcgggattggataaatatggcgaaaaaatagtgtggctttttccggtgtctttgaatgtagtcga

SEQ ID NO: 905 - DNA, 200 bp, Conyza canadensis
tcgactacattcaaagacaccggaaaaagccacactattttttcgccatatttatccaatcccgatggaaagaaaacttcttgagatgtacacgtacctgaaaagtcttgcactttgaataataattaagaaaatgcaggattatatggttcaggctcagaatttcattcatttttgtatcataaatagtattaccacaa

SEQ ID NO: 906 - DNA, 200 bp, Conyza canadensis
ttccggtgtctttgaatgtagtcgaaggactaagctttagttacttttataatgcaataataatggatcaaagtgttgtagaaattgatcgttccggatgatgttaaacattgcaaaatgttgtaacaaaacatggggctcgggttttgcttaatttgcatctgtaacaaaggctcgccatttttgggtatacttttaac

SEQ ID NO: 907 - DNA, 200 bp, Conyza canadensis
gttaaaagtatacccaaaaatggcgagcctttgttacagatgcaaattaagcaaaacccgagccccatgttttgttacaacattttgcaatgtttaacatcatccggaacgatcaatttctacaacactttgatccattattattgcattataaaagtaactaaagcttagtccttcgactacattcaaagacaccggaa

SEQ ID NO: 908 - DNA, 200 bp, Conyza canadensis
cgccatttttgggtatacttttaactatctgtctcaaccaaatagtttaaataaacgtgcttgaattagttgtacttttattataaatagttaggggatgaacttttgatatagaatatacaaattttctattcaagttaattatagccgttagaaaaatccctaaataaaagccaatcaggttttaggttttttttttt

SEQ ID NO: 909 - DNA, 200 bp, Conyza canadensis
aaaaaaaaaaacctaaaacctgattggcttttatttagggatttttctaacggctataattaacttgaatagaaaatttgtatattctatatcaaaagttcatcccctaactatttataataaaagtacaactaattcaagcacgtttatttaaactatttggttgagacagatagttaaaagtatacccaaaaatggcg

SEQ ID NO: 910 - DNA, 200 bp, Conyza canadensis
aatcaggttttaggttttttttttttcttgaaaagttttccattattttaagggttattccttgatggtgagccatttttgctcgttatagcggtctaaatagattttacctgtgaccggtgttatccattcacatggtcacctccaaaatatgcttaaggacatattcgaacttgaaatcttttgtgaggaaacatata

SEQ ID NO: 911 - DNA, 200 bp, Conyza canadensis
tatatgtttcctcacaaaagatttcaagttcgaatatgtccttaagcatattttggaggtgaccatgtgaatggataacaccggtcacaggtaaaatctatttagaccgctataacgagcaaaaatggctcaccatcaaggaataacccttaaaataatggaaaacttttcaagaaaaaaaaaaaacctaaaacctgatt

SEQ ID NO: 912 - DNA, 200 bp, Conyza canadensis
gaaatcttttgtgaggaaacatataattctttcgggttttgctaaacaaagctcaatgggtgtgcattaaatagttgtacacttaccataaaaatcaggggtgagcttttgatatgaaaaagtacaacttttttatgtactataagtgaaaccctaagggctttatttaacattttccaattctttatcactagataaac

SEQ ID NO: 913 - DNA, 200 bp, Conyza canadensis
gtttatctagtgataaagaattggaaaatgttaaataaagcccttagggtttcacttatagtacataaaaaagttgtactttttcatatcaaaagctcacccctgatttttatggtaagtgtacaactatttaatgcacacccattgagctttgtttagcaaaacccgaaagaattatatgtttcctcacaaaagatttc

SEQ ID NO: 914 - DNA, 200 bp, Conyza canadensis
tccaattctttatcactagataaacttgatgatggttagcttctttttttttcctaaacataggtgtcttactcacttagactagacccaaaagttgactcgctttgcgagcccaagtcagagtaggtaagtctctctttgggtcactagagtatttttcttaaggagtttcatccttttagagacatccccaatcaatg

SEQ ID NO: 915 - DNA, 200 bp, Conyza canadensis
cattgattggggatgtctctaaaaggatgaaactccttaagaaaaatactctagtgacccaaagagagacttacctactctgacttgggctcgcaaagcgagtcaacttttgggtctagtctaagtgagtaagacacctatgtttaggaaaaaaaaagaagctaaccatcatcaagtttatctagtgataaagaattgga

SEQ ID NO: 916 - DNA, 200 bp, Conyza canadensis
cttttagagacatccccaatcaatggacctccaccctagtgttttggttggttaataatttagtattattatccctgttatatattcttacaagaggttttagattaaaacattttaggtaatattttaggagtggttagaaaagggttgatcggagaggatgtaaaatattgttacgcaaggggtcagagtggaaagat

SEQ ID NO: 917 - DNA, 200 bp, Conyza canadensis
atctttccactctgaccccttgcgtaacaatattttacatcctctccgatcaacccttttctaaccactcctaaaatattacctaaaatgttttaatctaaaacctcttgtaagaatatataacagggataataatactaaattattaaccaaccaaaacactagggtggaggtccattgattggggatgtctctaaaag

SEQ ID NO: 918 - DNA, 200 bp, Conyza canadensis
acgcaaggggtcagagtggaaagataaaggccggtatagtctttcataggagtttgtgtcctcgaaattcacccaagaactttgtctttgtgctgtcgtacctttttctttttctttcccttttgtctgttactactccgtattaactgacgttttaatattgtttagcttaactaaatagattattggaggattagtat

SEQ ID NO: 919 - DNA, 200 bp, Conyza canadensis
atactaatcctccaataatctatttagttaagctaaacaatattaaaacgtcagttaatacggagtagtaacagacaaaagggaaagaaaaagaaaaaggtacgacagcacaaagacaaagttcttgggtgaatttcgaggacacaaactcctatgaaagactataccggcctttatctttccactctgaccccttgcgt

SEQ ID NO: 920 - DNA, 200 bp, Conyza canadensis
aaatagattattggaggattagtatttgttgtttagtcattaattgaaggtgaatcaagatccgaataaatgaatctaaaacctatttgcttagtcataaatcttcaagaaaagatgaattgttttgcttaattttaatccttaaagcaaacatgaattgaactcttaataaaaaagagctaggtatttatgacggttat

SEQ ID NO: 921 - DNA, 200 bp, Conyza canadensis
ataaccgtcataaatacctagctcttttttattaagagttcaattcatgtttgctttaaggattaaaattaagcaaaacaattcatcttttcttgaagatttatgactaagcaaataggttttagattcatttattcggatcttgattcaccttcaattaatgactaaacaacaaatactaatcctccaataatctattt

SEQ ID NO: 922 - DNA, 200 bp, Conyza canadensis
agagctaggtatttatgacggttattggctgctttaattaagctctttgtctgcatatcccgagtctatccaaatcatcaccccattatgctgtcggtgcttttaggacaaaatcattagtgttaagttcagtcttttaaaaccgttataaagctacaaatattagattcatcttctctacagagaggtgtatcttacat

SEQ ID NO: 923 - DNA, 200 bp, Conyza canadensis
atgtaagatacacctctctgtagagaagatgaatctaatatttgtagctttataacggttttaaaagactgaacttaacactaatgattttgtcctaaaagcaccgacagcataatggggtgatgatttggatagactcgggatatgcagacaaagagcttaattaaagcagccaataaccgtcataaatacctagctct

SEQ ID NO: 924 - DNA, 200 bp, Conyza canadensis
ctctacagagaggtgtatcttacattcttacacttaaaacggataaacagatgaattttttcttattttggtaattttttcgaactttttcactagtcgcttctaagattgtatataatgagattcgaacttgagacacccaattaaggatttgtgcctcgtaaatacatgagctgaagttaaagccaaatcactctttt

SEQ ID NO: 925 - DNA, 200 bp, Conyza canadensis
aaaagagtgatttggctttaacttcagctcatgtatttacgaggcacaaatccttaattgggtgtctcaagttcgaatctcattatatacaatcttagaagcgactagtgaaaaagttcgaaaaaattaccaaaataagaaaaaattcatctgtttatccgttttaagtgtaagaatgtaagatacacctctctgtagag

SEQ ID NO: 926 - DNA, 200 bp, Conyza canadensis
gaagttaaagccaaatcactcttttcacttctaatacctagtagcatattcatcattcattataaaattttacacgttatagttgttcaattatttatagtcgtcattaacatctgtttgagaagttcatcaatttccagtacactggtaatcacttaaaaataattggagtcgtctgtagtcccccctcatatgtgagt

SEQ ID NO: 927 - DNA, 200 bp, Conyza canadensis
actcacatatgaggggggactacagacgactccaattatttttaagtgattaccagtgtactggaaattgatgaacttctcaaacagatgttaatgacgactataaataattgaacaactataacgtgtaaaattttataatgaatgatgaatatgctactaggtattagaagtgaaaagagtgatttggctttaacttc

SEQ ID NO: 928 - DNA, 200 bp, Conyza canadensis
ctgtagtcccccctcatatgtgagtactttttaaattcaagaggacccatagatctttaactacatttattgatttatacattatttcatatagcattttctgcagatacgatttgttatgtagcaacatagacccatgttcagtccaaacatactagtacaattttggagcaatgcaataatgagtatctaaagtttca

SEQ ID NO: 929 - DNA, 200 bp, Conyza canadensis
tgaaactttagatactcattattgcattgctccaaaattgtactagtatgtttggactgaacatgggtctatgttgctacataacaaatcgtatctgcagaaaatgctatatgaaataatgtataaatcaataaatgtagttaaagatctatgggtcctcttgaatttaaaaagtactcacatatgaggggggactacag

SEQ ID NO: 930 - DNA, 200 bp, Conyza canadensis
gcaataatgagtatctaaagtttcatgtgagaataatcaattacttagacactagacgttttttaacaatcagtttgttcctggtacattggcaccaactcgtctgagccttcagcgcgttggccagcaagtagtttcggtttggtggtcactgtcgagcaattgggcacgttaagtattttttttacattttttatttc

SEQ ID NO: 931 - DNA, 200 bp, Conyza canadensis
gaaataaaaaatgtaaaaaaaatacttaacgtgcccaattgctcgacagtgaccaccaaaccgaaactacttgctggccaacgcgctgaaggctcagacgagttggtgccaatgtaccaggaacaaactgattgttaaaaaacgtctagtgtctaagtaattgattattctcacatgaaactttagatactcattattgc

SEQ ID NO: 932 - DNA, 200 bp, Conyza canadensis
atttttttatttaaaagtatatttaaaattttttgcccacaccaaaaaaaaatttaaaaaaaaagaagtacatatgcaatcaatgacatgcgatttcaatcccaactttcaaatctcaatttttaaatgctagtagctataagtaaataatctccattctccttctctatacatcttttcttattcaacaggtaatactt

SEQ ID NO: 933 - DNA, 200 bp, Conyza canadensis
aagtattacctgttgaataagaaaagatgtatagagaaggagaatggagattatttacttatagctactagcatttaaaaattgagatttgaaagttgggattgaaatcgcatgtcattgattgcatatgtacttctttttttttaaatttttttttggtgtgggcaaaaaattttaaatatacttttaaataaaaaaat

SEQ ID NO: 934 - DNA, 200 bp, Conyza canadensis
ttttcttattcaacaggtaatactttcatttattaatcataaaattatacatatatattttccctaatttttaggtttcttaatttcttttgacgtgaattgaaagatgaaaacgtgatgatagattggaagagccgaagaggggttttgttttggggaatctcacacataacacactaaacaacatattatcagttatc

SEQ ID NO: 935 - DNA, 200 bp, Conyza canadensis
gataactgataatatgttgtttagtgtgttatgtgtgagattccccaaaacaaaacccctcttcggctcttccaatctatcatcacgttttcatctttcaattcacgtcaaaagaaattaagaaacctaaaaattagggaaaatatatatgtataattttatgattaataaatgaaagtattacctgttgaataagaaaa

SEQ ID NO: 936 - DNA, 200 bp, Conyza canadensis
actaaacaacatattatcagttatcttgtattgatttaatataaaatatgagtactaaaataccattatatggatcgtataagtttagtgaatagttcgtgcttttggttatacgacgaaattgtagttgatttattatatcgtcttttgagtttgcattttggttgtaattggatggttattattttgtgggtatatga

SEQ ID NO: 937 - DNA, 200 bp, Conyza canadensis
tcatatacccacaaaataataaccatccaattacaaccaaaatgcaaactcaaaagacgatataataaatcaactacaatttcgtcgtataaccaaaagcacgaactattcactaaacttatacgatccatataatggtattttagtactcatattttatattaaatcaatacaagataactgataatatgttgtttagt

SEQ ID NO: 938 - DNA, 200 bp, Conyza canadensis
tggttattattttgtgggtatatgaatttattggaatttgatcgatatattaaaatttttgtacctatataatgttttaaatttgtcaccttacgataaagttcctggctctgccttgatagcagccttcatgtaaaattggttttcataaacgttctgagtttttataaattttgtaacatgtcattcttctggaaata

SEQ ID NO: 939 - DNA, 200 bp, Conyza canadensis
tatttccagaagaatgacatgttacaaaatttataaaaactcagaacgtttatgaaaaccaattttacatgaaggctgctatcaaggcagagccaggaactttatcgtaaggtgacaaatttaaaacattatataggtacaaaaattttaatatatcgatcaaattccaataaattcatatacccacaaaataataacca

SEQ ID NO: 940 - DNA, 200 bp, Conyza canadensis
gtaacatgtcattcttctggaaatatgcttctcttcaatttaacgcgtatatgagcgttgcattcgcatataatcgaatgtctcgtggaaagtactaaagacttggccaacgttaggtttcattatcatcttctgggggattgtttaagtccaacataattaagaattttcaaacagaaggaacaacataggaaaagtca

SEQ ID NO: 941 - DNA, 200 bp, Conyza canadensis
tgacttttcctatgttgttccttctgtttgaaaattcttaattatgttggacttaaacaatcccccagaagatgataatgaaacctaacgttggccaagtctttagtactttccacgagacattcgattatatgcgaatgcaacgctcatatacgcgttaaattgaagagaagcatatttccagaagaatgacatgttac

SEQ ID NO: 942 - DNA, 200 bp, Conyza canadensis
agaaggaacaacataggaaaagtcataatcaactgaatagtttgattagtcaatttatcagtacttaaactaagatatagtaagatgaggttgaaaaacaactactataacatacaaacatatatggatcttccttaaataataacaatgttaaagattactgcaaaaattacagaccttcattttcagcaatgatggta

SEQ ID NO: 943 - DNA, 200 bp, Conyza canadensis
taccatcattgctgaaaatgaaggtctgtaatttttgcagtaatctttaacattgttattatttaaggaagatccatatatgtttgtatgttatagtagttgtttttcaacctcatcttactatatcttagtttaagtactgataaattgactaatcaaactattcagttgattatgacttttcctatgttgttccttct

SEQ ID NO: 944 - DNA, 200 bp, Conyza canadensis
accttcattttcagcaatgatggtatgaagttgaaataatcgtttgttgttttcaattaacattttttcacaaagggagagagataactatggtgatcagctttatatttcaatataatgtgaaaggtctgagaaaaaaatttgaccaagtgtaaaaaatgtgttttggataaataaaagttaatttaaataatctacta

SEQ ID NO: 945 - DNA, 200 bp, Conyza canadensis
tagtagattatttaaattaacttttatttatccaaaacacattttttacacttggtcaaatttttttctcagacctttcacattatattgaaatataaagctgatcaccatagttatctctctccctttgtgaaaaaatgttaattgaaaacaacaaacgattatttcaacttcataccatcattgctgaaaatgaaggt

SEQ ID NO: 946 - DNA, 200 bp, Conyza canadensis
aaaagttaatttaaataatctactaaaattagcccctggtttacaaatatcatttcacttataatttattaaccataatttactaatttgttcagtcaaactttttttttttatatagtttctttatttaacgtactcacaacacattacaatctctcatgttgggtatttttactgctgcattacgtgagttttttttt

SEQ ID NO: 947 - DNA, 200 bp, Conyza canadensis
aaaaaaaaactcacgtaatgcagcagtaaaaatacccaacatgagagattgtaatgtgttgtgagtacgttaaataaagaaactatataaaaaaaaaaagtttgactgaacaaattagtaaattatggttaataaattataagtgaaatgatatttgtaaaccaggggctaattttagtagattatttaaattaactttt

SEQ ID NO: 948 - DNA, 200 bp, Conyza canadensis
tgctgcattacgtgagtttttttttattgtatcatataatttttgacagatgatttttaataaaacaaaccttttcactctttaatggtgaggtttcaactccacagtttaatcaattgccgatcgatgtatatatgtaatttttagttttgatttagtaaatacagaattatttaactagggtataggaagagtagaag

SEQ ID NO: 949 - DNA, 200 bp, Conyza canadensis
cttctactcttcctataccctagttaaataattctgtatttactaaatcaaaactaaaaattacatatatacatcgatcggcaattgattaaactgtggagttgaaacctcaccattaaagagtgaaaaggtttgttttattaaaaatcatctgtcaaaaattatatgatacaataaaaaaaaactcacgtaatgcagca

SEQ ID NO: 950 - DNA, 200 bp, Conyza canadensis
aactagggtataggaagagtagaagacttgaaaatatgggtgataatttcttgattctttcaatttgagtaagttaaaagaaatcttaactcttcaaattttagcatttaatttttatctaaaggttaagattaccataatttggactaatcccctccctaaaaatatatacccattttccttatttgacttggaaaata

SEQ ID NO: 951 - DNA, 200 bp, Conyza canadensis
tattttccaagtcaaataaggaaaatgggtatatatttttagggaggggattagtccaaattatggtaatcttaacctttagataaaaattaaatgctaaaatttgaagagttaagatttcttttaacttactcaaattgaaagaatcaagaaattatcacccatattttcaagtcttctactcttcctataccctagtt

SEQ ID NO: 952 - DNA, 200 bp, Conyza canadensis
ttttccttatttgacttggaaaatagtggggtagatcggatctgacctaacctgatttgacccgatccgacccgaacgttgaaaatgaaaattagtttactagaggtggttcacccacagagaagttataccaaaccgaaacaacccaacaatggcttctccaacaacaactacagatgataacaaaggtagatactatt

SEQ ID NO: 953 - DNA, 200 bp, Conyza canadensis
aatagtatctacctttgttatcatctgtagttgttgttggagaagccattgttgggttgtttcggtttggtataacttctctgtgggtgaaccacctctagtaaactaattttcattttcaacgttcgggtcggatcgggtcaaatcaggttaggtcagatccgatctaccccactattttccaagtcaaataaggaaaa

SEQ ID NO: 954 - DNA, 200 bp, Conyza canadensis
gatgataacaaaggtagatactatttctttttcttcttaataatcttaatatgttattattttcattgtagataatccagttctgcattttgttgcacagagaaagcacctgctaagagagttgcagttgttggtgccggtgtcaggtcaatgttactactttcatatatataatatatgtatcttgcgttttattttac

SEQ ID NO: 955 - DNA, 200 bp, Conyza canadensis
gtaaaataaaacgcaagatacatatattatatatatgaaagtagtaacattgacctgacaccggcaccaacaactgcaactctcttagcaggtgctttctctgtgcaacaaaatgcagaactggattatctacaatgaaaataataacatattaagattattaagaagaaaaagaaatagtatctacctttgttatcatc

SEQ ID NO: 956 - DNA, 200 bp, Conyza canadensis; identical to SEQ ID NO: 836

SEQ ID NO: 957 - DNA, 200 bp, Conyza canadensis; identical to SEQ ID NO: 837

SEQ ID NO: 958 - DNA, 200 bp, Conyza canadensis
tttgaccccaaaaatgctttgcttgtcggaggacatgaccaatatttggaggactaggattagcttagcggaatatggtagataagtaatccttttaggggtactttatataattgtggattgtcatgcatgatacctttcttatatgctcatatgacttctttgcactgttaggggtagtgttctcgacagctaggtga

SEQ ID NO: 959 - DNA, 200 bp, Conyza canadensis
tcacctagctgtcgagaacactacccctaacagtgcaaagaagtcatatgagcatataagaaaggtatcatgcatgacaatccacaattatataaagtacccctaaaaggattacttatctaccatattccgctaagctaatcctagtcctccaaatattggtcatgtcctccgacaagcaaagcatttttggggtcaaa

SEQ ID NO: 960 - DNA, 200 bp, Conyza canadensis
ggtagtgttctcgacagctaggtgacctatgctactttgtttcataggtcgattagggattagcacccactatttttttattttttggaaggcattaaattatattatattaaagataaaaattgccagtaagaaactagccgatacatagactgtccaatccaaaatagaaaactagcacccacattatatgtgggccc

SEQ ID NO: 961 - DNA, 200 bp, Conyza canadensis
gggcccacatataatgtgggtgctagttttctattttggattggacagtctatgtatcggctagtttcttactggcaatttttatctttaatataatataatttaatgccttccaaaaaataaaaaaatagtgggtgctaatccctaatcgacctatgaaacaaagtagcataggtcacctagctgtcgagaacactacc

SEQ ID NO: 962 - DNA, 200 bp, Conyza canadensis
tagcacccacattatatgtgggcccaccggtccctaggacttcctagtaaatatctacttatatctatgtatgcatggctgataccaaccctatttgcttttgtgacttgctgggaggaggttaaaggggttcttgacttcttgcacatgccactcgtactaccaaacctatttgcttctatgacttgctgggaggagac

SEQ ID NO: 963 - DNA, 200 bp, Conyza canadensis
gtctcctcccagcaagtcatagaagcaaataggtttggtagtacgagtggcatgtgcaagaagtcaagaacccctttaacctcctcccagcaagtcacaaaagcaaatagggttggtatcagccatgcatacatagatataagtagatatttactaggaagtcctagggaccggtgggcccacatataatgtgggtgcta

SEQ ID NO: 964 - DNA, 200 bp, Conyza canadensis
cttctatgacttgctgggaggagacatgcccctattaattgttgctctcatcccacatgtttggttctatgcagacggttatatttattatgtttttatgatgtttaatatgttcaaatgtcttatttactatgtattgtccaatttgggctatgtggtatgtcttctacccttgtctactcttaatgtagtaagagtat

SEQ ID NO: 965 - DNA, 200 bp, Conyza canadensis
atactcttactacattaagagtagacaagggtagaagacataccacatagcccaaattggacaatacatagtaaataagacatttgaacatattaaacatcataaaaacataataaatataaccgtctgcatagaaccaaacatgtgggatgagagcaacaattaataggggcatgtctcctcccagcaagtcatagaag

SEQ ID NO: 966 - DNA, 200 bp, Conyza canadensis
tctactcttaatgtagtaagagtatcatgatactcggtcgacaggtatggttactgaactctttacactctcctacttttgccttttttggatggaggtccttatggaagtagtctttctgcctctgggtagaggcaagactgtctacatctcacatcccccatacccctcgcacaagaattgggtcatgttgtttttgt

SEQ ID NO: 967 - DNA, 200 bp, Conyza canadensis
acaaaaacaacatgacccaattcttgtgcgaggggtatgggggatgtgagatgtagacagtcttgcctctacccagaggcagaaagactacttccataaggacctccatccaaaaaaggcaaaagtaggagagtgtaaagagttcagtaaccatacctgtcgaccgagtatcatgatactcttactacattaagagtaga

SEQ ID NO: 968 - DNA, 200 bp, Conyza canadensis
aagaattgggtcatgttgtttttgtggactcgaacccagatggtaagatgtttccaatggggtttacatattgttgattttttgctgctagtataatatattattttgattattcgttacatgtatgaaatttgtaaataaattggtgagtatagtagtctagtgcaacatggtgattgattgatatctagaggaatggc

SEQ ID NO: 969 - DNA, 200 bp, Conyza canadensis
gccattcctctagatatcaatcaatcaccatgttgcactagactactatactcaccaatttatttacaaatttcatacatgtaacgaataatcaaaataatatattatactagcagcaaaaaatcaacaatatgtaaaccccattggaaacatcttaccatctgggttcgagtccacaaaaacaacatgacccaattctt

SEQ ID NO: 970 - DNA, 200 bp, Conyza canadensis
attgattgatatctagaggaatggccggccatattatgttgaatcatgaatgaatgacttggtttgtttcagtgggcttgcggctgcatataagttaaaactacatggaataaatgtcactgtttttgaagccggtgagatagccggagggaaactaagaagcatttcacaaaacggtttaatatgggacgagggtgcca

SEQ ID NO: 971 - DNA, 200 bp, Conyza canadensis
tggcaccctcgtcccatattaaaccgttttgtgaaatgcttcttagtttccctccggctatctcaccggcttcaaaaacagtgacatttattccatgtagttttaacttatatgcagccgcaagcccactgaaacaaaccaagtcattcattcatgattcaacataatatggccggccattcctctagatatcaatcaat

SEQ ID NO: 972 - DNA, 200 bp, Conyza canadensis
ggtttaatatgggacgagggtgccaatactatggtatgatatcgatgttagtttgcttatagatatagacataacttacttctttttttttattttttttaaaaaaaagttgttttgatgctcttttactccgtatttgtagactgagagtgaaccggatgtcagcaggttgcttgatgatcttggtcttcgagataaac

SEQ ID NO: 973 - DNA, 200 bp, Conyza canadensis
gtttatctcgaagaccaagatcatcaagcaacctgctgacatccggttcactctcagtctacaaatacggagtaaaagagcatcaaaacaacttttttttaaaaaaaataaaaaaaaagaagtaagttatgtctatatctataagcaaactaacatcgatatcataccatagtattggcaccctcgtcccatattaaacc

SEQ ID NO: 974 - DNA, 200 bp, Conyza canadensis
gatgatcttggtcttcgagataaacaacagtctgtaagttatatgctgttggatatggaacatcatgcttcctgtagcgtgcgtttgaaaatttatttttgcaaatttctcccattgtatactaaatgacatagtataaagaagaggaaattgtttatatcacttttattcgtgttcaaatacggaaggctaaatccact

SEQ ID NO: 975 - DNA, 200 bp, Conyza canadensis
agtggatttagccttccgtatttgaacacgaataaaagtgatataaacaatttcctcttctttatactatgtcatttagtatacaatgggagaaatttgcaaaaataaattttcaaacgcacgctacaggaagcatgatgttccatatccaacagcatataacttacagactgttgtttatctcgaagaccaagatcatc

SEQ ID NO: 976 - DNA, 200 bp, Conyza canadensis
tcaaatacggaaggctaaatccactttatgtggctgtggctgtaataatttgtcggctatggttcttgtttcatttatttgttgtggtcatgtgtgtatatgtttaccatggctgaatactacactatatttccttttgcagccactttcccaacataagcgatatattgtaagaaatggaaaaccggtactggtatgat

SEQ ID NO: 977 - DNA, 200 bp, Conyza canadensis
atcataccagtaccggttttccatttcttacaatatatcgcttatgttgggaaagtggctgcaaaaggaaatatagtgtagtattcagccatggtaaacatatacacacatgaccacaacaaataaatgaaacaagaaccatagccgacaaattattacagccacagccacataaagtggatttagccttccgtatttga

SEQ ID NO: 978 - DNA, 200 bp, Conyza canadensis
aatggaaaaccggtactggtatgatatctcaacaccatgctgaaaactaatcctctgttatatatgaacaaaagagtttaaaagtataagatgaaactttacttcaaaatcattagtagaaattgtgttttattggactcaaattctcaacctcataaacacttgtcatttgtttacaaagttttgtaaactgattttgg

SEQ ID NO: 979 - DNA, 200 bp, Conyza canadensis
ccaaaatcagtttacaaaactttgtaaacaaatgacaagtgtttatgaggttgagaatttgagtccaataaaacacaatttctactaatgattttgaagtaaagtttcatcttatacttttaaactcttttgttcatatataacagaggattagttttcagcatggtgttgagatatcataccagtaccggttttccatt

SEQ ID NO: 980 - DNA, 200 bp, Conyza canadensis
acaaagttttgtaaactgattttggttttctgggaatgtaaataattatggcagtttattgtactgttctttcgtatagatagttataaactcaaaacacaaaaaaaaaggttgttttattacgcggtcgtagctgtcacaattttagttttcttttgtacttgccaagttcatgtcttatatactgaatgtaacttggc

SEQ ID NO: 981 - DNA, 200 bp, Conyza canadensis
gccaagttacattcagtatataagacatgaacttggcaagtacaaaagaaaactaaaattgtgacagctacgaccgcgtaataaaacaacctttttttttgtgttttgagtttataactatctatacgaaagaacagtacaataaactgccataattatttacattcccagaaaaccaaaatcagtttacaaaactttgt

SEQ ID NO: 982 - DNA, 200 bp, Conyza canadensis
tcttatatactgaatgtaacttggccaaactcatgtctgcaggtaccttctaaccccattgcactgatccaaagcagtttgctttccactcaatcaaaggttcgttagtagctcttggatgtttaagtctgaagtatttaaaccgtatccaatcctttcattctcatattatctacccaatgattctcaatgtcaaggct

SEQ ID NO: 983 - DNA, 200 bp, Conyza canadensis
agccttgacattgagaatcattgggtagataatatgagaatgaaaggattggatacggtttaaatacttcagacttaaacatccaagagctactaacgaacctttgattgagtggaaagcaaactgctttggatcagtgcaatggggttagaaggtacctgcagacatgagtttggccaagttacattcagtatataaga

SEQ ID NO: 984 - DNA, 200 bp, Conyza canadensis
cccaatgattctcaatgtcaaggctcacaaaaactctttatcctactatgctttaaatttttaataaaaatgatgcatgcccttttcggttgtatttaaaaaattatccaaaattgcaatggtaatatattagcacacgagttacacaaattctttctcattttgatatcagatgatctcaaaattataatttgtacttc

SEQ ID NO: 985 - DNA, 200 bp, Conyza canadensis
gaagtacaaattataattttgagatcatctgatatcaaaatgagaaagaatttgtgtaactcgtgtgctaatatattaccattgcaattttggataattttttaaatacaaccgaaaagggcatgcatcatttttattaaaaatttaaagcatagtaggataaagagtttttgtgagccttgacattgagaatcattggg

SEQ ID NO: 986 - DNA, 200 bp, Conyza canadensis
atctcaaaattataatttgtacttcattacattgtgtatgtgattatggggtttgttgcaaaaattacagcttcaaatacttttggagccattttcatggaagaagaagaactcgtctgatacacaagaaaggtaatatatagccttctttcctatctatctgttaaaccctattagggactaactttttatttatttac

SEQ ID NO: 987 - DNA, 200 bp, Conyza canadensis
gtaaataaataaaaagttagtccctaatagggtttaacagatagataggaaagaaggctatatattacctttcttgtgtatcagacgagttcttcttcttccatgaaaatggctccaaaagtatttgaagctgtaatttttgcaacaaaccccataatcacatacacaatgtaatgaagtacaaattataattttgagat

SEQ ID NO: 988 - DNA, 200 bp, Conyza canadensis
agggactaactttttatttatttactattttgtagtgttggtgcattctttcaacgtcattttgggaaggaggtatatgtatattgtaacctttatcttcagttcagttattctggtatacgtctttcttttgatattaaggggtccaagttttcatttgtgtggtacttcaaaatttgtccatgctttccgctatctta

SEQ ID NO: 989 - DNA, 200 bp, Conyza canadensis
taagatagcggaaagcatggacaaattttgaagtaccacacaaatgaaaacttggaccccttaatatcaaaagaaagacgtataccagaataactgaactgaagataaaggttacaatatacatatacctccttcccaaaatgacgttgaaagaatgcaccaacactacaaaatagtaaataaataaaaagttagtccct

SEQ ID NO: 990 - DNA, 200 bp, Conyza canadensis
tttgtccatgctttccgctatcttaattttctatacttaatgtacatatgtaaggttgttgagtatctcattaatcctgttgttgctggaacaagcggtggagatccggagtcactttctgtgagtaactcttccatgtccatgctgcttcatattagtgtggggatatacataactgatttcaattaacaaacaaaaac

SEQ ID NO: 991 - DNA, 200 bp, Conyza canadensis
gtttttgtttgttaattgaaatcagttatgtatatccccacactaatatgaagcagcatggacatggaagagttactcacagaaagtgactccggatctccaccgcttgttccagcaacaacaggattaatgagatactcaacaaccttacatatgtacattaagtatagaaaattaagatagcggaaagcatggacaaa

SEQ ID NO: 992 - DNA, 200 bp, Conyza canadensis
ctgatttcaattaacaaacaaaaacactttaaagcatgtggaggtgcaaatgcattctttgacacccctgctaagtgctacctctcatcattaaccttctaggttaatctatcaacctcatattttccatacagatgcgctattcattccctgaattatgggatttagagagaaggtatgtaagctacaaaataatatgt

SEQ ID NO: 993 - DNA, 200 bp, Conyza canadensis
acatattattttgtagcttacataccttctctctaaatcccataattcagggaatgaatagcgcatctgtatggaaaatatgaggttgatagattaacctagaaggttaatgatgagaggtagcacttagcaggggtgtcaaagaatgcatttgcacctccacatgctttaaagtgtttttgtttgttaattgaaatcag

SEQ ID NO: 994 - DNA, 200 bp, Conyza canadensis
gtatgtaagctacaaaataatatgtaattcattctttaagtgagcttgattatttgttcccatgcaatctactatgattttttattataatatttataaagcttggattcttaaattcaatgtgatgatggtcaaatcaacatgcaggtttggttcactcatttctggggcatttcagtctatgatctcttctcgaggca

SEQ ID NO: 995 - DNA, 200 bp, Conyza canadensis
tgcctcgagaagagatcatagactgaaatgccccagaaatgagtgaaccaaacctgcatgttgatttgaccatcatcacattgaatttaagaatccaagctttataaatattataataaaaaatcatagtagattgcatgggaacaaataatcaagctcacttaaagaatgaattacatattattttgtagcttacatac

SEQ ID NO: 996 - DNA, 200 bp, Conyza canadensis
cagtctatgatctcttctcgaggcagaaaaaagagtccttcaggaagcagcaagcgcaggcgtggctccttttcatttttaggtggaatgcaggtaagattggtgattttgtctgtcaagattcatttattggaatctaatatattctttaaagtagaaacaggccatcaatatattgcttactttgttcttttaaatct

SEQ ID NO: 997 - DNA, 200 bp, Conyza canadensis
agatttaaaagaacaaagtaagcaatatattgatggcctgtttctactttaaagaatatattagattccaataaatgaatcttgacagacaaaatcaccaatcttacctgcattccacctaaaaatgaaaaggagccacgcctgcgcttgctgcttcctgaaggactcttttttctgcctcgagaagagatcatagactg

SEQ ID NO: 998 - DNA, 200 bp, Conyza canadensis
ttgcttactttgttcttttaaatctttattctcatgcagacacttacaaatgcactgagcaaagaagttggacaacatgaacttaatcttcaatccaaggtgcttgaaatgtcctatagctgtgatgataacactactgggaattggtcgatctattgtgctccagatcagaacaaacaattaaatcagcaaccttttga

SEQ ID NO: 999 - DNA, 200 bp, Conyza canadensis
tcaaaaggttgctgatttaattgtttgttctgatctggagcacaatagatcgaccaattcccagtagtgttatcatcacagctataggacatttcaagcaccttggattgaagattaagttcatgttgtccaacttctttgctcagtgcatttgtaagtgtctgcatgagaataaagatttaaaagaacaaagtaagcaa

SEQ ID NO: 1000 - DNA, 200 bp, Conyza canadensis
aacaattaaatcagcaaccttttgatgctgtgatcatgactgtgagtatagttgtgttatcttacggtgacattgacataaatttggttaatgttttgcattttgacaagactagtttgtctcagcaacttttttttgtgctatcttggtggatctggattcatcaaatattcaaatctgtggacaaaatatggaaattc

SEQ ID NO: 1001 - DNA, 200 bp, Conyza canadensis
gaatttccatattttgtccacagatttgaatatttgatgaatccagatccaccaagatagcacaaaaaaaagttgctgagacaaactagtcttgtcaaaatgcaaaacattaaccaaatttatgtcaatgtcaccgtaagataacacaactatactcacagtcatgatcacagcatcaaaaggttgctgatttaattgtt

SEQ ID NO: 1002 - DNA, 200 bp, Conyza canadensis
atctgtggacaaaatatggaaattcttattctctatttcagaaataggagaattattgtttatacacccatttgttttaatgcttattagtttgtaagtgcaattagaacgtaattaacacagtacatgctcccgaattaggccccacttggcaatgtgaaagaaatgaagattacaaagacaggaagtctgttcctgct

SEQ ID NO: 1003 - DNA, 200 bp, Conyza canadensis
agcaggaacagacttcctgtctttgtaatcttcatttctttcacattgccaagtggggcctaattcgggagcatgtactgtgttaattacgttctaattgcacttacaaactaataagcattaaaacaaatgggtgtataaacaataattctcctatttctgaaatagagaataagaatttccatattttgtccacagat

SEQ ID NO: 1004 - DNA, 200 bp, Conyza canadensis
caaagacaggaagtctgttcctgctcaattttatacctgaggtatgttattgtaccgtgtgagttctatcatatggaattcgtgcagaaccccttagttttagctcttttgaaatttaaacaataatctttaccatggggagatatcctttaaaggaatattttctggtttttataatgcagcttagttatatgccagtt

SEQ ID NO: 1005 - DNA, 200 bp, Conyza canadensis
aactggcatataactaagctgcattataaaaaccagaaaatattcctttaaaggatatctccccatggtaaagattattgtttaaatttcaaaagagctaaaactaaggggttctgcacgaattccatatgatagaactcacacggtacaataacatacctcaggtataaaattgagcaggaacagacttcctgtctttg

SEQ ID NO: 1006 - DNA, 200 bp, Conyza canadensis
aatgcagcttagttatatgccagtttcagtcataatctctacattcaagaaagagaatgtgaagcggccccttgagggatttggaatgcttgttcctgccaaggagcaggaaaatggtttgaagacgttaggtaaagcttgcctgtgtattatcttttttttttttttccttttcatttttttttcatttttttttcttt

SEQ ID NO: 1007 - DNA, 200 bp, Conyza canadensis
aaagaaaaaaaaatgaaaaaaaaatgaaaaggaaaaaaaaaaaaaagataatacacaggcaagctttacctaacgtcttcaaaccattttcctgctccttggcaggaacaagcattccaaatccctcaaggggccgcttcacattctctttcttgaatgtagagattatgactgaaactggcatataactaagctgcatt

SEQ ID NO: 1008 - DNA, 200 bp, Conyza canadensis
atttttttttcatttttttttctttattgtctataattattattgaaaattctgttatgcaggcactctcttttcttccatgatgtttccagatcgtgcccctgaagacttgtatctttataccacctttgttgggggaagtcgaaacaaagaactggccaatgcttcgaggtaggcttgatcattgcaataatttctgc

SEQ ID NO: 1009 - DNA, 200 bp, Conyza canadensis
gcagaaattattgcaatgatcaagcctacctcgaagcattggccagttctttgtttcgacttcccccaacaaaggtggtataaagatacaagtcttcaggggcacgatctggaaacatcatggaagaaaagagagtgcctgcataacagaattttcaataataattatagacaataaagaaaaaaaaatgaaaaaaaaat

SEQ ID NO: 1010 - DNA, 200 bp, Conyza canadensis
gcttgatcattgcaataatttctgctcaatattttagcttcaaatttactcaagtattgaggaagtagttgtataatggctgtctctaaaaacttcataagagaatcttcttgaccattccctataggaatatcaatctattatttatgatgattatgatgagtaagtaataatttagtttggaaacttttttggaggaa

SEQ ID NO: 1011 - DNA, 200 bp, Conyza canadensis
ttcctccaaaaaagtttccaaactaaattattacttactcatcataatcatcataaataatagattgatattcctatagggaatggtcaagaagattctcttatgaagtttttagagacagccattatacaactacttcctcaatacttgagtaaatttgaagctaaaatattgagcagaaattattgcaatgatcaagc

SEQ ID NO: 1012 - DNA, 200 bp, Conyza canadensis
tagtttggaaacttttttggaggaaaggagaaatgttggagctttcttgttgctgtttaaggggagaggacataactcaagtataattcttgcaataatatatattttctgtaaatacagggatgagttgaagcagatagtaacttctgacctcagacagttgcttggagcagagggagagccacaatttttgacgtaag

SEQ ID NO: 1013 - DNA, 200 bp, Conyza canadensis
cttacgtcaaaaattgtggctctccctctgctccaagcaactgtctgaggtcagaagttactatctgcttcaactcatccctgtatttacagaaaatatatattattgcaagaattatacttgagttatgtcctctccccttaaacagcaacaagaaagctccaacatttctcctttcctccaaaaaagtttccaaacta

SEQ ID NO: 1014 - DNA, 200 bp, Conyza canadensis
ggagagccacaatttttgacgtaaggacacattctagctctgctgcttttattaaacgttagtttatctagatcaaaggattgcaagaattgcattcctgagcactatacaaacaattacacaacttaattttcagcttagactttttcattggcgcatgttcaccaattgaaattgtttcttgaaatttaacttttttt

SEQ ID NO: 1015 - DNA, 200 bp, Conyza canadensis
aaaaaaagttaaatttcaagaaacaatttcaattggtgaacatgcgccaatgaaaaagtctaagctgaaaattaagttgtgtaattgtttgtatagtgctcaggaatgcaattcttgcaatcctttgatctagataaactaacgtttaataaaagcagcagagctagaatgtgtccttacgtcaaaaattgtggctctcc

SEQ ID NO: 1016 - DNA, 200 bp, Conyza canadensis
tgtttcttgaaatttaacttttttttaaaagcccgaggttcacagatacttgtacaatgtacaagtagcttatgcttaatttgtcttgtgtttttttgttcatgtcatacatgataatgatgtagtttaattgcagtcactattactggagcaaagcatatccattgtacgggcgtgactatggcttagttatggaagca

SEQ ID NO: 1017 - DNA, 200 bp, Conyza canadensis
tgcttccataactaagccatagtcacgcccgtacaatggatatgctttgctccagtaatagtgactgcaattaaactacatcattatcatgtatgacatgaacaaaaaaacacaagacaaattaagcataagctacttgtacattgtacaagtatctgtgaacctcgggcttttaaaaaaaagttaaatttcaagaaaca

SEQ ID NO: 1018 - DNA, 200 bp, Conyza canadensis
tgactatggcttagttatggaagcaattgagaagatggaaagagagctacctggttacttttatgcgggtaaacctttttgtgtttgaaataaagtagatatatacatatctatactcccttataaagagtattagatttcttaaaattaagcattttttttcttcctaaaatacccctacttatacataaaacctttat

SEQ ID NO: 1019 - DNA, 200 bp, Conyza canadensis
ataaaggttttatgtataagtaggggtattttaggaagaaaaaaaatgcttaattttaagaaatctaatactctttataagggagtatagatatgtatatatctactttatttcaaacacaaaaaggtttacccgcataaaagtaaccaggtagctctctttccatcttctcaattgcttccataactaagccatagtca

SEQ ID NO: 1020 - DNA, 200 bp, Conyza canadensis
ccctacttatacataaaacctttatatatcatcctttcccacattgtctctaatcattacacgctctcctcgaccttctatcaccctccgccgccgccctccttctccaccaccgccctcgatctccaccaccgcctcccttttatattgtcatcgccttttagccgttgcaacgcgcggacactatgctcgtattaaaa

SEQ ID NO: 1021 - DNA, 200 bp, Conyza canadensis
ttttaatacgagcatagtgtccgcgcgttgcaacggctaaaaggcgatgacaatataaaagggaggcggtggtggagatcgagggcggtggtggagaaggagggcggcggcggagggtgatagaaggtcgaggagagcgtgtaatgattagagacaatgtgggaaaggatgatatataaaggttttatgtataagtaggg

SEQ ID NO: 1022 - DNA, 200 bp, Conyza canadensis
cgcggacactatgctcgtattaaaagtagtaacgtaataaacataaagtttacgtaaagtttatatatttcattattttgttatgattttgtactgatgaatatatatttaagctaaaatcattcactctagagtgtaagtcgaacgggtccaaactgaactaaactatttgtctatggtagtcaaattcttaatctttt

SEQ ID NO: 1023 - DNA, 200 bp, Conyza canadensis
aaaagattaagaatttgactaccatagacaaatagtttagttcagtttggacccgttcgacttacactctagagtgaatgattttagcttaaatatatattcatcagtacaaaatcataacaaaataatgaaatatataaactttacgtaaactttatgtttattacgttactacttttaatacgagcatagtgtccgcg

SEQ ID NO: 1024 - DNA, 200 bp, Conyza canadensis
atggtagtcaaattcttaatctttttggtatcgatcgttgtgtagtgttgcacacctcacttgatattagttttatgtgattatatatggttaatttaatttttctttgatttttgatcatggtcttaaatatcattaaaggtgaagaaacatgtgaagagggataaatttggagaaagaatggcatcactaaaacagat

SEQ ID NO: 1025 - DNA, 200 bp, Conyza canadensis
atctgttttagtgatgccattctttctccaaatttatccctcttcacatgtttcttcacctttaatgatatttaagaccatgatcaaaaatcaaagaaaaattaaattaaccatatataatcacataaaactaatatcaagtgaggtgtgcaacactacacaacgatcgataccaaaaagattaagaatttgactaccat

SEQ ID NO: 1026 - DNA, 200 bp, Conyza canadensis
aaagaatggcatcactaaaacagatagtgtcaccctatggcaaggttagtccttctttaagtttattaattatatgtaatttgtttgattaggtatatcatatatgtatactagttgttttgatttccaatctatacaagtaggattttgctaaacatagttgtaagggttatagttacaacacaatagaatggtataca

SEQ ID NO: 1027 - DNA, 200 bp, Conyza canadensis
tgtataccattctattgtgttgtaactataacccttacaactatgtttagcaaaatcctacttgtatagattggaaatcaaaacaactagtatacatatatgatatacctaatcaaacaaattacatataattaataaacttaaagaaggactaaccttgccatagggtgacactatctgttttagtgatgccattcttt

SEQ ID NO: 1028 - DNA, 200 bp, Conyza canadensis
ttacaacacaatagaatggtatacatacattatatatatataaagatatataactgtttattaataataatctttaaccgtcatgtaaaccaatttactttgctttatccatatccttaaaggctatgaatagcatagtcgatgtaagtatatggttgcttagacggtgtgttaatgttgatcgtacaggagtctagact

SEQ ID NO: 1029 - DNA, 200 bp, Conyza canadensis
agtctagactcctgtacgatcaacattaacacaccgtctaagcaaccatatacttacatcgactatgctattcatagcctttaaggatatggataaagcaaagtaaattggtttacatgacggttaaagattattattaataaacagttatatatctttatatatatataatgtatgtataccattctattgtgttgtaa

SEQ ID NO: 1030 - DNA, 200 bp, Conyza canadensis
tgttgatcgtacaggagtctagacttggaccattgtgttttagagaagaagggaatcgaacgcaaaggtaaaacttcctttatttttaagagcatagttataatatcattcaaatttaaccaacaatttctgttacatacatcgaaataggcttgattactcatacctatagagatgagtgacatgtgtgtatgaagatt

SEQ ID NO: 1031 - DNA, 200 bp, Conyza canadensis
aatcttcatacacacatgtcactcatctctataggtatgagtaatcaagcctatttcgatgtatgtaacagaaattgttggttaaatttgaatgatattataactatgctcttaaaaataaaggaagttttacctttgcgttcgattcccttcttctctaaaacacaatggtccaagtctagactcctgtacgatcaaca

SEQ ID NO: 1032 - DNA, 200 bp, Conyza canadensis
tgagtgacatgtgtgtatgaagatttatatattgaattgtaggatatcattttcccatttctaatgtactagttaattatggtttgcggtttttttctttgttgtatgtccattacaaaattacagttggacatcttcttggtggaattcagatgatataaaatagttaattttaccaaacactacatcattggtagaga

SEQ ID NO: 1033 - DNA, 200 bp, Conyza canadensis
tctctaccaatgatgtagtgtttggtaaaattaactattttatatcatctgaattccaccaagaagatgtccaactgtaattttgtaatggacatacaacaaagaaaaaaaccgcaaaccataattaactagtacattagaaatgggaaaatgatatcctacaattcaatatataaatcttcatacacacatgtcactca

SEQ ID NO: 1034 - DNA, 200 bp, Conyza canadensis
ccaaacactacatcattggtagagagaaattagaacgtagataaatggtttgtaagtttcaaaagagatactcgtattacataaaatgttgtcttttgcaattcgcagatttccaattacaacagatttgacacaatgttctattatttgttaatccaaccatgaaccactaataaaacagtacaaacatcttgaataaa

SEQ ID NO: 1035 - DNA, 200 bp, Conyza canadensis
tttattcaagatgtttgtactgttttattagtggttcatggttggattaacaaataatagaacattgtgtcaaatctgttgtaattggaaatctgcgaattgcaaaagacaacattttatgtaatacgagtatctcttttgaaacttacaaaccatttatctacgttctaatttctctctaccaatgatgtagtgtttgg

SEQ ID NO: 1036 - DNA, 200 bp, Conyza canadensis
aaacagtacaaacatcttgaataaaaaaaagccaccaatacattattgattgttgtatgctttttgtctccatataatgaccagtaatatcaaaaaacatgtattttattcttattctagcttaaaaaggttcaaaaatgcacatccaactttctctcttctttccaatcatagcttttcaaattaaaagcatacacgta

SEQ ID NO: 1037 - DNA, 200 bp, Conyza canadensis
tacgtgtatgcttttaatttgaaaagctatgattggaaagaagagagaaagttggatgtgcatttttgaacctttttaagctagaataagaataaaatacatgttttttgatattactggtcattatatggagacaaaaagcatacaacaatcaataatgtattggtggcttttttttattcaagatgtttgtactgttt

SEQ ID NO: 1038 - DNA, 200 bp, Conyza canadensis
ttttcaaattaaaagcatacacgtaaaagaaacatatggatgtagattgatatgtgtgtggggggtagttggttaaccatgtcacgtgctctgcatcacctcccatccttggaccccaatttgttttttgtacctactacatatttaagtaactttatggcacctcaccaaaaaccaaccaaacaaaccaaactcccaac

SEQ ID NO: 1039 - DNA, 200 bp, Conyza canadensis
gttgggagtttggtttgtttggttggtttttggtgaggtgccataaagttacttaaatatgtagtaggtacaaaaaacaaattggggtccaaggatgggaggtgatgcagagcacgtgacatggttaaccaactaccccccacacacatatcaatctacatccatatgtttcttttacgtgtatgcttttaatttgaaaa

SEQ ID NO: 1040 - DNA, 200 bp, Conyza canadensis
caaccaaacaaaccaaactcccaactatacatcacttaattgcacacacacatatacctcaacaagtacttacatctctcccagatttctgtcattccaattttcttgtttttaatcacaattttgttgttgttgtcaatgtctgtctcttttcaaaccagctaaaaaaagaagcaaattcttgatttgattcagctgtt

SEQ ID NO: 1041 - DNA, 200 bp, Conyza canadensis
aacagctgaatcaaatcaagaatttgcttctttttttagctggtttgaaaagagacagacattgacaacaacaacaaaattgtgattaaaaacaagaaaattggaatgacagaaatctgggagagatgtaagtacttgttgaggtatatgtgtgtgtgcaattaagtgatgtatagttgggagtttggtttgtttggttg

SEQ ID NO: 1042 - DNA, 200 bp, Conyza canadensis
aaattcttgatttgattcagctgttgttccacttgtttatggttagtctttctcattctttcaccccccaagtttaaatctttgagttaatttcttcaaattcctgtgttttttgaaccgggtttttatcagttttgttgagtttagcaaaaaagtagagttgggtatgtaaagattgaatctttttactgggtttatgt

SEQ ID NO: 1043 - DNA, 200 bp, Conyza canadensis
acataaacccagtaaaaagattcaatctttacatacccaactctacttttttgctaaactcaacaaaactgataaaaacccggttcaaaaaacacaggaatttgaagaaattaactcaaagatttaaacttggggggtgaaagaatgagaaagactaaccataaacaagtggaacaacagctgaatcaaatcaagaattt

SEQ ID NO: 1044 - DNA, 200 bp, Conyza canadensis
ttgaatctttttactgggtttatgtaatttctttgaaatttataagtttcttgcaatgggtatatgattttctattgattgaagtggttaataacaggatttggtgagtaaagtttgaatctttcgagttatggatttatgtcataccttttcttgcccttcaaaataaagtcaaagctttagttttgtgatttgacttt

SEQ ID NO: 1045 - DNA, 200 bp, Conyza canadensis
aaagtcaaatcacaaaactaaagctttgactttattttgaagggcaagaaaaggtatgacataaatccataactcgaaagattcaaactttactcaccaaatcctgttattaaccacttcaatcaatagaaaatcatatacccattgcaagaaacttataaatttcaaagaaattacataaacccagtaaaaagattcaa

SEQ ID NO: 1046 - DNA, 200 bp, Conyza canadensis
agctttagttttgtgatttgactttggtatcccttcaaaataaagtcaaagctttagttttgtgatttgactttggtatgctgttgctcccatgaatattttcatgctgtttgtaaattgtaatatatattttgataaattcaattttgttatatttgtttcctgataaagttttaatgtgattagtgattacttcaatt

SEQ ID NO: 1047 - DNA, 200 bp, Conyza canadensis
aattgaagtaatcactaatcacattaaaactttatcaggaaacaaatataacaaaattgaatttatcaaaatatatattacaatttacaaacagcatgaaaatattcatgggagcaacagcataccaaagtcaaatcacaaaactaaagctttgactttattttgaagggataccaaagtcaaatcacaaaactaaagct

SEQ ID NO: 1048 - DNA, 200 bp, Conyza canadensis
cgattcgagttcccggccattgctcgattgcgtggtcgtcggcgccggaattagcggactgtgtatagcgcaagcgttgtcaacgaagcacggcggcgacgtggtcgtgacagaggcgcgtgagagagttggaggaaatatatcgacagttgaaagagatggttatttatgggaagaaggtcctaatagctttcaaccct

SEQ ID NO: 1049 - DNA, 200 bp, Conyza canadensis
agggttgaaagctattaggaccttcttcccataaataaccatctctttcaactgtcgatatatttcctccaactctctcacgcgcctctgtcacgaccacgtcgccgccgtgcttcgttgacaacgcttgcgctatacacagtccgctaattccggcgccgacgaccacgcaatcgagcaatggccgggaactcgaatcg

SEQ ID NO: 1050 - DNA, 200 bp, Conyza canadensis
gaaggtcctaatagctttcaaccctccgatcctatgcttactatggtggtggacagtggattgaaggatgatttggtgttgggtgatccaactgcacctcggtttgtgttatgggatggtgatctgaagccggtgccttccagtccatctgatttgcctacctttgatctgatgagccttggtgggaaactccgagccgg

SEQ ID NO: 1051 - DNA, 200 bp, Conyza canadensis
ccggctcggagtttcccaccaaggctcatcagatcaaaggtaggcaaatcagatggactggaaggcaccggcttcagatcaccatcccataacacaaaccgaggtgcagttggatcacccaacaccaaatcatccttcaatccactgtccaccaccatagtaagcataggatcggagggttgaaagctattaggaccttc

SEQ ID NO: 1052 - DNA, 200 bp, Conyza canadensis
gccttggtgggaaactccgagccggttttggggctcttggaatccgccctccacctccagaccgtgaggaatctgttgaagagtttgtccggcgtaatcttggtgatgaagtttttgaacgtttgattgaaccattttgctcaggtgtttacgcgggggatccatcaaaacttagtatgaaagcagcatttggaaaggtt

SEQ ID NO: 1053 - DNA, 200 bp, Conyza canadensis
aacctttccaaatgctgctttcatactaagttttgatggatcccccgcgtaaacacctgagcaaaatggttcaatcaaacgttcaaaaacttcatcaccaagattacgccggacaaactcttcaacagattcctcacggtctggaggtggagggcggattccaagagccccaaaaccggctcggagtttcccaccaaggc

SEQ ID NO: 1054 - DNA, 200 bp, Conyza canadensis
tatgaaagcagcatttggaaaggtttggaagctggagcaaaatggtggtagcattgttgggggagcatttaaagcaatccaagctaaaaataagagtaccaagcctcctcgagacccgagattaccaacaccgaagggccaaactgttggatcttttaggaagggacaagcaatgttgcctaatgccatctcaaaagggt

SEQ ID NO: 1055 - DNA, 200 bp, Conyza canadensis
acccttttgagatggcattaggcaacattgcttgtcccttcctaaaagatccaacagtttggcccttcggtgttggtaatctcgggtctcgaggaggcttggtactcttatttttagcttggattgctttaaatgctcccccaacaatgctaccaccattttgctccagcttccaaacctttccaaatgctgctttcata

SEQ ID NO: 1056 - DNA, 200 bp, Conyza canadensis
ttgcctaatgccatctcaaaagggttgggtagcagagtgaagttatcctgggagctcgtaggtatcactaaatctgagaatagagggtatagtttgacatatcgaacaccagatggattggaaagtctgcagactaaaactgttgtcatgactgttccatcctatgtggctagtgacttgttgcgtcctctttcggtgga

SEQ ID NO: 1057 - DNA, 200 bp, Conyza canadensis
tccaccgaaagaggacgcaacaagtcactagccacataggatggaacagtcatgacaacagttttagtctgcagactttccaatccatctggtgttcgatatgtcaaactataccctctattctcagatttagtgatacctacgagctcccaggataacttcactctgctacccaacccttttgagatggcattaggcaa

SEQ ID NO: 1058 - DNA, 200 bp, Conyza canadensis
acttgttgcgtcctctttcggtggaagcagcagatgctttgtcaaaattttattatcccccggttgcagctgtatctgtttcctatccaaaagaggcaattcgtgcggaccgtttgattgacggtcagctcaagggttttggtcagttgcatccacgaagtcagggcgtggagactctaggtaccatatacagttcgtct

SEQ ID NO: 1059 - DNA, 200 bp, Conyza canadensis
agacgaactgtatatggtacctagagtctccacgccctgacttcgtggatgcaactgaccaaaacccttgagctgaccgtcaatcaaacggtccgcacgaattgcctcttttggataggaaacagatacagctgcaaccgggggataataaaattttgacaaagcatctgctgcttccaccgaaagaggacgcaacaagt

SEQ ID NO: 1060 - DNA, 200 bp, Conyza canadensis
tctaggtaccatatacagttcgtctcttttccctaaccgtgctccacctggaagggttctgctcctgaactacattggaggggctacaaatcctggtattttatcaaagacggagagtcaaattgttgaagcagttgatcgcgacctacggaagatgctgataaatcctaaagcaggagagccattgaccttaggagtga

SEQ ID NO: 1061 - DNA, 200 bp, Conyza canadensis
tcactcctaaggtcaatggctctcctgctttaggatttatcagcatcttccgtaggtcgcgatcaactgcttcaacaatttgactctccgtctttgataaaataccaggatttgtagcccctccaatgtagttcaggagcagaacccttccaggtggagcacggttagggaaaagagacgaactgtatatggtacctaga

SEQ ID NO: 1062 - DNA, 200 bp, Conyza canadensis
ggagagccattgaccttaggagtgaaagtgtggcctcgagcgatcccacagtttctgattggtcattatgacattttagaggctgctaaatgtgctcttagtcttgctggataccggggtatgtttcttggagggaactatgtatctggtgtagctttaggtagatgtgtggagaatgcctatgaggttgcagccgatgt

SEQ ID NO: 1063 - DNA, 200 bp, Conyza canadensis
acatcggctgcaacctcataggcattctccacacatctacctaaagctacaccagatacatagttccctccaagaaacataccccggtatccagcaagactaagagcacatttagcagcctctaaaatgtcataatgaccaatcagaaactgtgggatcgctcgaggccacactttcactcctaaggtcaatggctctcc

SEQ ID NO: 1064 - DNA, 200 bp, Conyza canadensis
atgcctatgaggttgcagccgatgtaagtaattttttgtcacggggcgtgtacaagtaatacgtcactcttcggaaattagtgtttatgaggttagtaattaaagttttggcacaaggcatgtggaagtgaaaacgcggactttcagtgaagttagtcatctattctcaagcctcatggctaaatgtaattcgagttaat

SEQ ID NO: 1065 - DNA, 200 bp, Conyza canadensis
attaactcgaattacatttagccatgaggcttgagaatagatgactaacttcactgaaagtccgcgttttcacttccacatgccttgtgccaaaactttaattactaacctcataaacactaatttccgaagagtgacgtattacttgtacacgccccgtgacaaaaaattacttacatcggctgcaacctcataggcat

SEQ ID NO: 1066 - DNA, 200 bp, Conyza canadensis
cgtcaccatactgccacggtcgccacaccttcgtctctatcactatcaccgtcgcatcgcacggacatcatctagtcaatatttatttatgaggaatggagatatatctatactttcatattaaattaaactgcctatttttttcaactattctacctttgaaatgcctattataccctcctataaacaactatccattc

SEQ ID NO: 1067 - DNA, 200 bp, Conyza canadensis
gaatggatagttgtttataggagggtataataggcatttcaaaggtagaatagttgaaaaaaataggcagtttaatttaatatgaaagtatagatatatctccattcctcataaataaatattgactagatgatgtccgtgcgatgcgacggtgatagtgatagagacgaaggtgtggcgaccgtggcagtatggtgacg

SEQ ID NO: 1068 - DNA, 200 bp, Conyza canadensis
ccctcctataaacaactatccattctactcttttaattgattttctcgtactacccttccatctatttcccaatacttatccctaatctctaatcccctcctctcttgctgtcgccgaaaacctaatagaaaaattagtttcatttctacggcaactaccataaacctacaaaaagattggttttatctctccctcacca

SEQ ID NO: 1069 - DNA, 200 bp, Conyza canadensis
tggtgagggagagataaaaccaatctttttgtaggtttatggtagttgccgtagaaatgaaactaatttttctattaggttttcggcgacagcaagagaggaggggattagagattagggataagtattgggaaatagatggaagggtagtacgagaaaatcaattaaaagagtagaatggatagttgtttataggaggg

SEQ ID NO: 1070 - DNA, 200 bp, Conyza canadensis
gattggttttatctctccctcaccaccaccaccacaaatcacccattccttacaagctctcaaatcggttaggtgattttccattgaaatcgcttgtttttattttattttattatatctaatttcctaatttaaatccattgtttttgtatttttcccaattttctttttgaatttggtttgggttaatgttctgatca

SEQ ID NO: 1071 - DNA, 200 bp, Conyza canadensis
tgatcagaacattaacccaaaccaaattcaaaaagaaaattgggaaaaatacaaaaacaatggatttaaattaggaaattagatataataaaataaaataaaaacaagcgatttcaatggaaaatcacctaaccgatttgagagcttgtaaggaatgggtgatttgtggtggtggtggtgagggagagataaaaccaatc

SEQ ID NO: 1072 - DNA, 200 bp, Conyza canadensis
ttggtttgggttaatgttctgatcatccatgtattttgttcgtacattcacaaaagaaaaaggtaccgacacatttaatgatcacttttttaaaggtaccgtcgcatcatgtgggtacccatctagctagttgatgaataaattattagtattgttaaatttaagttttttgtttaatgagtaatttaagagtatgttta

SEQ ID NO: 1073 - DNA, 200 bp, Conyza canadensis
taaacatactcttaaattactcattaaacaaaaaacttaaatttaacaatactaataatttattcatcaactagctagatgggtacccacatgatgcgacggtacctttaaaaaagtgatcattaaatgtgtcggtacctttttcttttgtgaatgtacgaacaaaatacatggatgatcagaacattaacccaaaccaa

SEQ ID NO: 1074 - DNA, 200 bp, Conyza canadensis
aatgagtaatttaagagtatgtttaaatttgggttaaaaaaaaaagaaaaaaaaagtaaatgtgtattgatttgtaagttgtaaccgtctaatattataaaaagaaaaagagaaaccactcctatataaaacagtcaagcctcttgtatcattaaccgggttgatttaagagcgaactttgatcgaattttgggttttcg

SEQ ID NO: 1075 - DNA, 200 bp, Conyza canadensis
cgaaaacccaaaattcgatcaaagttcgctcttaaatcaacccggttaatgatacaagaggcttgactgttttatataggagtggtttctctttttctttttataatattagacggttacaacttacaaatcaatacacatttactttttttttcttttttttttaacccaaatttaaacatactcttaaattactcatt

SEQ ID NO: 1076 - DNA, 200 bp, Conyza canadensis
actttgatcgaattttgggttttcgaatttgctttccatccacatcgatatctgcccaagtaagaaaccctcgttcctgtctctctttaatttacatctccatgtgcttttcgatcctaattataaatatgcggataaccgcagcattactacccgacgcccaaaggaagaggaaaaagtcgtcgtcaaaggcagatcaa

SEQ ID NO: 1077 - DNA, 200 bp, Conyza canadensis
ttgatctgcctttgacgacgactttttcctcttcctttgggcgtcgggtagtaatgctgcggttatccgcatatttataattaggatcgaaaagcacatggagatgtaaattaaagagagacaggaacgagggtttcttacttgggcagatatcgatgtggatggaaagcaaattcgaaaacccaaaattcgatcaaagt

SEQ ID NO: 1078 - DNA, 200 bp, Conyza canadensis
aaagtcgtcgtcaaaggcagatcaacaaatattgatatattgataataatgtaatagaatatgagaggcttccagccaagtccgcatgtcgtttcaagtctgtttccaaacactggaattcgttcctatccacacgtatgtttggaccaccagctccatcacatgaacaaatcctataaacttctcttacttgaccagct

SEQ ID NO: 1079 - DNA, 200 bp, Conyza canadensis
agctggtcaagtaagagaagtttataggatttgttcatgtgatggagctggtggtccaaacatacgtgtggataggaacgaattccagtgtttggaaacagacttgaaacgacatgcggacttggctggaagcctctcatattctattacattattatcaatatatcaatatttgttgatctgcctttgacgacgacttt

SEQ ID NO: 1080 - DNA, 200 bp, Conyza canadensis
ataaacttctcttacttgaccagctagccccctgtagataaggatttatgcagcaaacccctcaaccacgtacggttccattaccgtcggttttaatcgactggaggaagccgatcctagatttaattcgcttgtaggatggattggtatgtgtagccgatccttgatctatatttcaatttcactggctaggtgtaggc

SEQ ID NO: 1081 - DNA, 200 bp, Conyza canadensis
gcctacacctagccagtgaaattgaaatatagatcaaggatcggctacacataccaatccatcctacaagcgaattaaatctaggatcggcttcctccagtcgattaaaaccgacggtaatggaaccgtacgtggttgaggggtttgctgcataaatccttatctacagggggctagctggtcaagtaagagaagtttat

SEQ ID NO: 1082 - DNA, 200 bp, Conyza canadensis
tcaatttcactggctaggtgtaggcattattattaagcaatgtgatcgattgatggctaattcaggcgtttgaattcaacttttcattagtcaagtaattattctcaagtttatatattaatagtatatatacgatatcatagtataatatacaaaataaaatctatccaaaaggaataaaatctttggaaaggaataaa

SEQ ID NO: 1083 - DNA, 200 bp, Conyza canadensis
tttattcctttccaaagattttattccttttggatagattttattttgtatattatactatgatatcgtatatatactattaatatataaacttgagaataattacttgactaatgaaaagttgaattcaaacgcctgaattagccatcaatcgatcacattgcttaataataatgcctacacctagccagtgaaattga

SEQ ID NO: 1084 - DNA, 200 bp, Conyza canadensis
aataaaatctttggaaaggaataaaatctatccaaaaagaataaaatctatccaaaaggaataaaatctttctaaagatttcggacattcactataaatagtgacagcagatgagatggaaagaaaaaaagaaaaaaaggaacaagaatactcctttggagagaatacttgaactctcatccctcaaatcattgttaaca

SEQ ID NO: 1085 - DNA, 200 bp, Conyza canadensis
tgttaacaatgatttgagggatgagagttcaagtattctctccaaaggagtattcttgttcctttttttctttttttctttccatctcatctgctgtcactatttatagtgaatgtccgaaatctttagaaagattttattccttttggatagattttattctttttggatagattttattcctttccaaagattttatt

SEQ ID NO: 1086 - DNA, 200 bp, Conyza canadensis
ctcatccctcaaatcattgttaacataatcactaccctcataggattggatggcgtaaaaccgtatacgtaatacggttaccagcagggatcgccacccaaatatcctaatcttcctcacaccttcccatgctaggtggcatgggacccacataactctctttatttatataatgatattagattacatactccttgaac

SEQ ID NO: 1087 - DNA, 200 bp, Conyza canadensis
gttcaaggagtatgtaatctaatatcattatataaataaagagagttatgtgggtcccatgccacctagcatgggaaggtgtgaggaagattaggatatttgggtggcgatccctgctggtaaccgtattacgtatacggttttacgccatccaatcctatgagggtagtgattatgttaacaatgatttgagggatgag

SEQ ID NO: 1088 - DNA, 200 bp, Conyza canadensis
atattagattacatactccttgaaccgtaagtgttaatcgacgtatcatcatatatacactaatatctatgttaaataattaataaacaaaatatgacacataaaatttttgcgagatatttttggcgaagcattgcacaaaaagcagcaaggctaggatatttttggcccacaatgtaccgcgatgcaacaaagattgt

SEQ ID NO: 1089 - DNA, 200 bp, Conyza canadensis
acaatctttgttgcatcgcggtacattgtgggccaaaaatatcctagccttgctgctttttgtgcaatgcttcgccaaaaatatctcgcaaaaattttatgtgtcatattttgtttattaattatttaacatagatattagtgtatatatgatgatacgtcgattaacacttacggttcaaggagtatgtaatctaatat

SEQ ID NO: 1090 - DNA, 200 bp, Conyza canadensis
tgtaccgcgatgcaacaaagattgtcgacaattgtgataattgccaatgccatgctcctatcatacgtcaaccccaacacgacttgacaagtatttcaagtccatggccgttctatcaatggggaacagatatcgtaggaccattcccagaagcaccaggaaaagtgaaatttttggtagtcgcaatcgactattttact

SEQ ID NO: 1091 - DNA, 200 bp, Conyza canadensis
agtaaaatagtcgattgcgactaccaaaaatttcacttttcctggtgcttctgggaatggtcctacgatatctgttccccattgatagaacggccatggacttgaaatacttgtcaagtcgtgttggggttgacgtatgataggagcatggcattggcaattatcacaattgtcgacaatctttgttgcatcgcggtaca

SEQ ID NO: 1092 - DNA, 200 bp, Conyza canadensis
ggtagtcgcaatcgactattttactaaattggcagaagcagagccactggcaacaataactggacataaaatactcaagttcgtatggcgcaacattgtatgtcgttatggaattccaggaattatcatcagtgacaacggaaagcaattcgcaaataacccatttcgggagtggtgtgaagagcttaaaataagacaac

SEQ ID NO: 1093 - DNA, 200 bp, Conyza canadensis
gttgtcttattttaagctcttcacaccactcccgaaatgggttatttgcgaattgctttccgttgtcactgatgataattcctggaattccataacgacatacaatgttgcgccatacgaacttgagtattttatgtccagttattgttgccagtggctctgcttctgccaatttagtaaaatagtcgattgcgactacc

SEQ ID NO: 1094 - DNA, 200 bp, Conyza canadensis
ttaggtggaatgcagacacttacaaatgcactgagcaaagaagttggacaacatgaacttaatcttcaatccaaggtgcttgaaatgtcctatagctgtgatgataacactactgggaattggtcgatctattgtgctccagatcagaacaaacaattaaatcagcaaccttttgatgctgtgatcatgactgccccact

SEQ ID NO: 1095 - DNA, 200 bp, Conyza canadensis
agtggggcagtcatgatcacagcatcaaaaggttgctgatttaattgtttgttctgatctggagcacaatagatcgaccaattcccagtagtgttatcatcacagctataggacatttcaagcaccttggattgaagattaagttcatgttgtccaacttctttgctcagtgcatttgtaagtgtctgcattccacctaa

SEQ ID NO: 1096 - DNA, 200 bp, Conyza canadensis
atgctgtgatcatgactgccccacttggcaatgtgaaagaaatgaagattacaaagacaggaagtctgttcctgctcaattttatacctgagcttagttatatgccagtttcagtcataatctctacattcaagaaagagaatgtgaagcggccccttgagggatttggaatgcttgttcctgccaaggagcaggaaaat

SEQ ID NO: 1097 - DNA, 200 bp, Conyza canadensis
attttcctgctccttggcaggaacaagcattccaaatccctcaaggggccgcttcacattctctttcttgaatgtagagattatgactgaaactggcatataactaagctcaggtataaaattgagcaggaacagacttcctgtctttgtaatcttcatttctttcacattgccaagtggggcagtcatgatcacagcat

SEQ ID NO: 1098 - DNA, 200 bp, Conyza canadensis
tgttcctgccaaggagcaggaaaatggtttgaagacgttaggcactctcttttcttccatgatgtttccagatcgtgcccctgaagacttgtatctttataccacctttgttgggggaagtcgaaacaaagaactggccaatgcttcgagggatgagttgaagcagatagtaacttctgacctcagacagttgcttggag

SEQ ID NO: 1099 - DNA, 200 bp, Conyza canadensis
ctccaagcaactgtctgaggtcagaagttactatctgcttcaactcatccctcgaagcattggccagttctttgtttcgacttcccccaacaaaggtggtataaagatacaagtcttcaggggcacgatctggaaacatcatggaagaaaagagagtgcctaacgtcttcaaaccattttcctgctccttggcaggaaca

SEQ ID NO: 1100 - DNA, 200 bp, Digitaria sanguinalis
acctaatgccatctcaaaaagcttgggtagcagagtgaaattatcatggaagctaataaatatctcaaagttggagaatagaggttataatttgacttacgaaacaccaaatggatttgcaagtctgcaaactaaaactgttgtcatgactgttccttcctacgtggcgagtgacttgttgcgtcctctttcgtcggaag

SEQ ID NO: 1101 - DNA, 200 bp, Digitaria sanguinalis
cttccgacgaaagaggacgcaacaagtcactcgccacgtaggaaggaacagtcatgacaacagttttagtttgcagacttgcaaatccatttggtgtttcgtaagtcaaattataacctctattctccaactttgagatatttattagcttccatgataatttcactctgctacccaagctttttgagatggcattaggt

SEQ ID NO: 1102 - DNA, 200 bp, Digitaria sanguinalis
ttgttgcgtcctctttcgtcggaagcagctgaggctttgtccaaattttattaccctccagttgcagctgtatctgtttcctatccaaaagaggcgattcgtgctgaccgtttgatcgatggtcaacttaagggttttggtcaattacatccaagaagtcaaggcgttgagactttaggtaccatctatagttcatccct

SEQ ID NO: 1103 - DNA, 200 bp, Digitaria sanguinalis
agggatgaactatagatggtacctaaagtctcaacgccttgacttcttggatgtaattgaccaaaacccttaagttgaccatcgatcaaacggtcagcacgaatcgcctcttttggataggaaacagatacagctgcaactggagggtaataaaatttggacaaagcctcagctgcttccgacgaaagaggacgcaacaa

SEQ ID NO: 1104 - DNA, 200 bp, Digitaria sanguinalis
cttgcgtctcacaaaaggcgcgagctggccggcccgctacttttgtgctttgtcttgtctccttcaggcttcagcaatggacaaacatccccctcaagtaaagcttaatagaaatcgattttgatgaacgaataaccatcattaacggcatcatggccatcgcttcgatgggatcagttgcttgcagagccggccaaagt

SEQ ID NO: 1105 - DNA, 200 bp, Digitaria sanguinalis
actttggccggctctgcaagcaactgatcccatcgaagcgatggccatgatgccgttaatgatggttattcgttcatcaaaatcgatttctattaagctttacttgagggggatgtttgtccattgctgaagcctgaaggagacaagacaaagcacaaaagtagcgggccggccagctcgcgccttttgtgagacgcaag

SEQ ID NO: 1106 - DNA, 200 bp, Digitaria sanguinalis
agttgcttgcagagccggccaaagtgggcacgtgagagccacgaggatacgcgagatgacgacgaccatggaggtggtttcgaactttcgatcgccgatttttattgcgtcagtttcacagccagagatgcttggcctagtacggctgacgatgagcgtttgtttagctcatctgaaggaatgtgttttgcctgttgcca

SEQ ID NO: 1107 - DNA, 200 bp, Digitaria sanguinalis
tggcaacaggcaaaacacattccttcagatgagctaaacaaacgctcatcgtcagccgtactaggccaagcatctctggctgtgaaactgacgcaataaaaatcggcgatcgaaagttcgaaaccacctccatggtcgtcgtcatctcgcgtatcctcgtggctctcacgtgcccactttggccggctctgcaagcaact

SEQ ID NO: 1108 - DNA, 200 bp, Digitaria sanguinalis
aaggaatgtgttttgcctgttgccaccaagattagcgtccttttcttttatcgaattcgggtcaccatttccactattaatcaaagatatagtttctatattttttctcattaatccacagtaccttttatttcagtagttattattgcatccatacttcaccagtacggcaccctttgcaatctctgcctacactccat

SEQ ID NO: 1109 - DNA, 200 bp, Digitaria sanguinalis
atggagtgtaggcagagattgcaaagggtgccgtactggtgaagtatggatgcaataataactactgaaataaaaggtactgtggattaatgagaaaaaatatagaaactatatctttgattaatagtggaaatggtgacccgaattcgataaaagaaaaggacgctaatcttggtggcaacaggcaaaacacattcctt

SEQ ID NO: 1110 - DNA, 200 bp, Digitaria sanguinalis
tttgcaatctctgcctacactccattacctcgaagaatagtgcactacagatgcaataaacacccacctcaccgactgctcgtaggtgcaccagtacactacatttgctgctgcatgctggtcgccatcatccttcctgcctgcaggaagcagcagggtgtctgggatctgcatcatgccgggcgcacaagaggaacaga

SEQ ID NO: 1111 - DNA, 200 bp, Digitaria sanguinalis
tctgttcctcttgtgcgcccggcatgatgcagatcccagacaccctgctgcttcctgcaggcaggaaggatgatggcgaccagcatgcagcagcaaatgtagtgtactggtgcacctacgagcagtcggtgaggtgggtgtttattgcatctgtagtgcactattcttcgaggtaatggagtgtaggcagagattgcaaa

SEQ ID NO: 1112 - DNA, 200 bp, Digitaria sanguinalis
atgccgggcgcacaagaggaacagacgtgccaataaaagggctagcaacgcaacgaggggagggcccctttttttcgtgttacctcccgtcctgtgcatgagttgtcgtgtgtaacagacgtgcttggtgataaagcgtaggtgaagaagtggcctcccctgtgtcccctcccttctcaggaacgtttcgtcatcttttc

SEQ ID NO: 1113 - DNA, 200 bp, Digitaria sanguinalis
gaaaagatgacgaaacgttcctgagaagggaggggacacaggggaggccacttcttcacctacgctttatcaccaagcacgtctgttacacacgacaactcatgcacaggacgggaggtaacacgaaaaaaaggggccctcccctcgttgcgttgctagcccttttattggcacgtctgttcctcttgtgcgcccggcat

SEQ ID NO: 1114 - DNA, 200 bp, Digitaria sanguinalis
ctcaggaacgtttcgtcatcttttcactgaaaacgggcgcgtgctaactgccgcatctgtgagttgaatggttgattggagagaaattaggtgtgcaatcaccacttgggcggcaatcgtgtgcacttacttttggttgggtgtcagatcaacaacaggggtttcttggggaaatgtttccaaatgtacttctcaaaatt

SEQ ID NO: 1115 - DNA, 200 bp, Digitaria sanguinalis
aattttgagaagtacatttggaaacatttccccaagaaacccctgttgttgatctgacacccaaccaaaagtaagtgcacacgattgccgcccaagtggtgattgcacacctaatttctctccaatcaaccattcaactcacagatgcggcagttagcacgcgcccgttttcagtgaaaagatgacgaaacgttcctgag

SEQ ID NO: 1116 - DNA, 200 bp, Digitaria sanguinalis
gtttccaaatgtacttctcaaaattacttctagtgtacacatgttgaatttcagttcaaatttatttacaagaataataaacaaagaagaaaattggcaaacaacattcataaaaaatggaatgaaaagagaaatgcatccttcttttgaagataaatagtcaaatgccatgtttgtttcgttcacaaacagaaaaatga

SEQ ID NO: 1117 - DNA, 200 bp, Digitaria sanguinalis
tcatttttctgtttgtgaacgaaacaaacatggcatttgactatttatcttcaaaagaaggatgcatttctcttttcattccattttttatgaatgttgtttgccaattttcttctttgtttattattcttgtaaataaatttgaactgaaattcaacatgtgtacactagaagtaattttgagaagtacatttggaaac

SEQ ID NO: 1118 - DNA, 200 bp, Digitaria sanguinalis
gtttcgttcacaaacagaaaaatgatttcatgattgcaccgcaagagtggatgaatatatataggtctacagttgaacaccaatttggaagaaaaattcatgaggcagaagtaaaatcgattatttccttgagcttccgcattgcatctcccaaaagaaaaccattaaatactactagcaagttctagtacagtccctac

SEQ ID NO: 1119 - DNA, 200 bp, Digitaria sanguinalis
gtagggactgtactagaacttgctagtagtatttaatggttttcttttgggagatgcaatgcggaagctcaaggaaataatcgattttacttctgcctcatgaatttttcttccaaattggtgttcaactgtagacctatatatattcatccactcttgcggtgcaatcatgaaatcatttttctgtttgtgaacgaaac

SEQ ID NO: 1120 - DNA, 200 bp, Digitaria sanguinalis
tagcaagttctagtacagtccctactaattaaacatcagcataattatccttcttatactcactcgggttttttcttatatgtcgtattagtttcatcttaagtcaaacttgtcaaaatttgaccaagtttatacaaaagtataacaataactatactaccaaacttatatggtatcacaatatatttcattagtaggga

SEQ ID NO: 1121 - DNA, 200 bp, Digitaria sanguinalis
tccctactaatgaaatatattgtgataccatataagtttggtagtatagttattgttatacttttgtataaacttggtcaaattttgacaagtttgacttaagatgaaactaatacgacatataagaaaaaacccgagtgagtataagaaggataattatgctgatgtttaattagtagggactgtactagaacttgcta

SEQ ID NO: 1122 - DNA, 200 bp, Digitaria sanguinalis
tcacaatatatttcattagtagggactgtctcgccggtcggggaaattaaacgccccccgatccgtcaccgtgacctgccctcctccccgcccgggcagatcgggccatcgcctccatcggggcacggctaggtacctgaaaacgatcgagcaaagcggccggttcgtttcgttcgtagcgagaggcatttgctgccagt

SEQ ID NO: 1123 - DNA, 200 bp, Digitaria sanguinalis
actggcagcaaatgcctctcgctacgaacgaaacgaaccggccgctttgctcgatcgttttcaggtacctagccgtgccccgatggaggcgatggcccgatctgcccgggcggggaggagggcaggtcacggtgacggatcggggggcgtttaatttccccgaccggcgagacagtccctactaatgaaatatattgtga

SEQ ID NO: 1124 - DNA, 200 bp, Digitaria sanguinalis
gtagcgagaggcatttgctgccagttcccggcgcgggacacgcgcgcgcgaaatggcggtgtcgagagggagggaggcgtcgctttcggcgggcgggggcgtgttccctggctgtagcccggcggcgcggcaggcctcgcgcgggtgtcaataccggcccggcggattaggtccccgtctttatgaccggcgcgcgcgca

SEQ ID NO: 1125 - DNA, 200 bp, Digitaria sanguinalis
tgcgcgcgcgccggtcataaagacggggacctaatccgccgggccggtattgacacccgcgcgaggcctgccgcgccgccgggctacagccagggaacacgcccccgcccgccgaaagcgacgcctccctccctctcgacaccgccatttcgcgcgcgcgtgtcccgcgccgggaactggcagcaaatgcctctcgctac

SEQ ID NO: 1126 - DNA, 200 bp, Digitaria sanguinalis
cgtctttatgaccggcgcgcgcgcacccttgcggtgcccgtgcgttgacgacgctgccaccgcacgtcccccttcttcattccatggcagggacgacgacgctagctatagctgcacgtacgcggtcgatcgagtggctatggcttggtctctactgcacgccatgccgcccggcctcccaccacaataactcgtgtgcc

SEQ ID NO: 1127 - DNA, 200 bp, Digitaria sanguinalis
ggcacacgagttattgtggtgggaggccgggcggcatggcgtgcagtagagaccaagccatagccactcgatcgaccgcgtacgtgcagctatagctagcgtcgtcgtccctgccatggaatgaagaagggggacgtgcggtggcagcgtcgtcaacgcacgggcaccgcaagggtgcgcgcgcgccggtcataaagacg

SEQ ID NO: 1128 - DNA, 200 bp, Digitaria sanguinalis
ctcccaccacaataactcgtgtgccggcccggcacggcgcgggccgtggtggaactgatcgcgtcgcgcattgatcatcatgcgtgggggcgtcggggcgacggctcgagcgtgcgcacatgattgtgcgtgtcaggatcccagacgctagctacagcttgctgctggtccatccagtgccctacgtggacgccgatcgc

SEQ ID NO: 1129 - DNA, 200 bp, Digitaria sanguinalis
gcgatcggcgtccacgtagggcactggatggaccagcagcaagctgtagctagcgtctgggatcctgacacgcacaatcatgtgcgcacgctcgagccgtcgccccgacgcccccacgcatgatgatcaatgcgcgacgcgatcagttccaccacggcccgcgccgtgccgggccggcacacgagttattgtggtgggag

SEQ ID NO: 1130 - DNA, 200 bp, Digitaria sanguinalis
agtgccctacgtggacgccgatcgctgtgtgttggtgtgtggggtgatgatgatggcggatggatggagtcatggaggcactgcggggctcacaggagattttggtgggtggtggacgcatccgtcgcgtcgcccccggcgctcgagtgcaccccgtaccaacccaacacgtccgctgtcgtggagacgccggagggcgc

SEQ ID NO: 1131 - DNA, 200 bp, Digitaria sanguinalis
gcgccctccggcgtctccacgacagcggacgtgttgggttggtacggggtgcactcgagcgccgggggcgacgcgacggatgcgtccaccacccaccaaaatctcctgtgagccccgcagtgcctccatgactccatccatccgccatcatcatcaccccacacaccaacacacagcgatcggcgtccacgtagggcact

SEQ ID NO: 1132 - DNA, 200 bp, Digitaria sanguinalis
ctgtcgtggagacgccggagggcgcatgaaatcattgttaattttctcttgtgtgttttttttaaaaaaattataataacaaaagatgcatgctcccttcttctttgattaactaatcgatcagctagctaactcacacattgtccttcctgcaagtagcgcatgtatatttatgctcaactatatgggtatatactttt

SEQ ID NO: 1133 - DNA, 200 bp, Digitaria sanguinalis
aaaagtatatacccatatagttgagcataaatatacatgcgctacttgcaggaaggacaatgtgtgagttagctagctgatcgattagttaatcaaagaagaagggagcatgcatcttttgttattataatttttttaaaaaaaacacacaagagaaaattaacaatgatttcatgcgccctccggcgtctccacgacag

SEQ ID NO: 1134 - DNA, 200 bp, Digitaria sanguinalis
gacatcctgcgtccactttcaagtgatgctgcagatgccctttcaagattctattatccaccagttggtgctgtgactatttcatatccaaaggaagcaattagaaaggaatgcttgattgatggggagctccagggttttggccagttgcatccacgtagtcaaggagttgagacattaggaacaatatacagctcatc

SEQ ID NO: 1135 - DNA, 200 bp, Digitaria sanguinalis
gatgagctgtatattgttcctaatgtctcaactccttgactacgtggatgcaactggccaaaaccctggagctccccatcaatcaagcattcctttctaattgcttcctttggatatgaaatagtcacagcaccaactggtggataatagaatcttgaaagggcatctgcagcatcacttgaaagtggacgcaggatgtc

SEQ ID NO: 1136 - DNA, 200 bp, Digitaria sanguinalis
cattaggaacaatatacagctcatcactcttcccaaatcgtgctcctgctggaagggtattacttctaaactatataggaggtgctacaaacactgggattgtctccaagagtgaaagtgagctggtagaagcagttgaccgtgaccttaggaaaatgctcatcaaccctagagcagtggaccctttagtccttggtgtc

SEQ ID NO: 1137 - DNA, 200 bp, Digitaria sanguinalis
gacaccaaggactaaagggtccactgctctagggttgatgagcattttcctaaggtcacggtcaactgcttctaccagctcactttcactcttggagacaatcccagtgtttgtagcacctcctatatagtttagaagtaatacccttccagcaggagcacgatttgggaagagtgatgagctgtatattgttcctaatg

SEQ ID NO: 1138 - DNA, 200 bp, Digitaria sanguinalis
agtggaccctttagtccttggtgtccgagtgtggccacaagccatacctcagttcctggtaggacatcttgatcttctggaggttgcaaaatctgccttgggccgaggtggctatgatgggctcttcctaggagggaattatgtagcaggagttgccctgggccgatgcgtggagggtgcctatgaaagcgcctcgcaaa

SEQ ID NO: 1139 - DNA, 200 bp, Digitaria sanguinalis
tttgcgaggcgctttcataggcaccctccacgcatcggcccagggcaactcctgctacataattccctcctaggaagagcccatcatagccacctcggcccaaggcagattttgcaacctccagaagatcaagatgtcctaccaggaactgaggtatggcttgtggccacactcggacaccaaggactaaagggtccact

SEQ ID NO: 1140 - DNA, 200 bp, Digitaria sanguinalis
ggtgcctatgaaagcgcctcgcaaatatctgacttcttgaccaagtatgcctacaagtgatgaaagaagtcgagctgctcgttgttttgcatagatgaggtgagaccaggagtggcacaaagtttacaaggattttttttttcatcttatttcgtaaattgtacttctgatctttttccctgttagtaattagttagact

SEQ ID NO: 1141 - DNA, 200 bp, Digitaria sanguinalis
agtctaactaattactaacagggaaaaagatcagaagtacaatttacgaaataagatgaaaaaaaaaatccttgtaaactttgtgccactcctggtctcacctcatctatgcaaaacaacgagcagctcgacttctttcatcacttgtaggcatacttggtcaagaagtcagatatttgcgaggcgctttcataggcacc

SEQ ID NO: 1142 - DNA, 200 bp, Digitaria sanguinalis
taggtatttctttcaactgagtcttaagctacaacatctacagattattgtttttcttttgtggtgtgatttttcattctagtatgtattatgtcttcttttgttgaatccaagatatgaatcaaaatagtggtggtatgcttttgtaggaacaatatacagctcatcactcttcccaaatcgtgctcctgctggaaggg

SEQ ID NO: 1143 - DNA, 200 bp, Digitaria sanguinalis
cccttccagcaggagcacgatttgggaagagtgatgagctgtatattgttcctacaaaagcataccaccactattttgattcatatcttggattcaacaaaagaagacataatacatactagaatgaaaaatcacaccacaaaagaaaaacaataatctgtagatgttgtagcttaagactcagttgaaagaaataccta

SEQ ID NO: 1144 - DNA, 200 bp, Digitaria sanguinalis
ccaaatcgtgctcctgctggaagggtgttacttctaaactatataggaggtgctacaaacactggaattgtttccaaggttagtaattctctgtcgaacttattgccttgagttttgtgttcatgatgttttgactgtaaaaagaaaattggcattctttaataatcaacgtaagcagtattttaaaaagaaagttggca

SEQ ID NO: 1145 - DNA, 200 bp, Digitaria sanguinalis
tgccaactttctttttaaaatactgcttacgttgattattaaagaatgccaattttctttttacagtcaaaacatcatgaacacaaaactcaaggcaataagttcgacagagaattactaaccttggaaacaattccagtgtttgtagcacctcctatatagtttagaagtaacacccttccagcaggagcacgatttgg

SEQ ID NO: 1146 - DNA, 200 bp, Digitaria sanguinalis
cagtattttaaaaagaaagttggcattttaataatcaatatcaacttgtaactagattgcttattattggctattattatttaggtgggacccgcagactatttaggtgtggaacccatgtgggacccgcatactatttaggcgggacccacgcatattcagacacactatttagagtggaacctacaataatgttaagc

SEQ ID NO: 1147 - DNA, 200 bp, Digitaria sanguinalis
gcttaacattattgtaggttccactctaaatagtgtgtctgaatatgcgtgggtcccgcctaaatagtatgcgggtcccacatgggttccacacctaaatagtctgcgggtcccacctaaataataatagccaataataagcaatctagttacaagttgatattgattattaaaatgccaactttctttttaaaatactg

SEQ ID NO: 1148 - DNA, 200 bp, Digitaria sanguinalis
agtggaacctacaataatgttaagcgtctacgttatttaaaaaattattgataattgttttcattctttgcagtataaaatatatttatttttttctatgtataaaaataatctctaactttgtatactacattcgtttgtgatagttctaatactttttgtactttgctttcatttcataaatttgaaaaataagattg

SEQ ID NO: 1149 - DNA, 200 bp, Digitaria sanguinalis
caatcttatttttcaaatttatgaaatgaaagcaaagtacaaaaagtattagaactatcacaaacgaatgtagtatacaaagttagagattatttttatacatagaaaaaaataaatatattttatactgcaaagaatgaaaacaattatcaataattttttaaataacgtagacgcttaacattattgtaggttccact

SEQ ID NO: 1150 - DNA, 200 bp, Digitaria sanguinalis
ttcataaatttgaaaaataagattgaattatacattcgttacaaaatgtatcttttttctattaaaaattaaaaattagtgtaacataacacgtcactccattagctatttctactaccacttatatagtgcttaaatgattattatgattaaaaaatttgtctaaatttaatattgcattgagtatagtaagataacaa

SEQ ID NO: 1151 - DNA, 200 bp, Digitaria sanguinalis
ttgttatcttactatactcaatgcaatattaaatttagacaaattttttaatcataataatcatttaagcactatataagtggtagtagaaatagctaatggagtgacgtgttatgttacactaatttttaatttttaatagaaaaaagatacattttgtaacgaatgtataattcaatcttatttttcaaatttatgaa

SEQ ID NO: 1152 - DNA, 200 bp, Digitaria sanguinalis
tgcattgagtatagtaagataacaaatttgtattacatcattattttagtttaacatcttctatatagacgcacatcgctcgtcaacccaactagtattcctaatgatgccatctcaattgcagagtgaaagtgagctggtagaagcagttgatcgtgacctcaggaaaatgctcatcgaccctagagcagtggaccctt

SEQ ID NO: 1153 - DNA, 200 bp, Digitaria sanguinalis
aagggtccactgctctagggtcgatgagcattttcctgaggtcacgatcaactgcttctaccagctcactttcactctgcaattgagatggcatcattaggaatactagttgggttgacgagcgatgtgcgtctatatagaagatgttaaactaaaataatgatgtaatacaaatttgttatcttactatactcaatgca

SEQ ID NO: 1154 - DNA, 200 bp, Digitaria sanguinalis
tggaggattctttcaacgtcattttgggaaggaggttgttgagtatctcattgatccagttgttgcgggaacaagcggtggagatcctgaatcactttcaatgcgttatgcgtttcctgagttatgggatttagagagaaggttcggttcaatcatttctggggcatttctgtcaatgttatcttccagaggtgggaaaa

SEQ ID NO: 1155 - DNA, 200 bp, Digitaria sanguinalis
ttttcccacctctggaagataacattgacagaaatgccccagaaatgattgaaccgaaccttctctctaaatcccataactcaggaaacgcataacgcattgaaagtgattcaggatctccaccgcttgttcccgcaacaactggatcaatgagatactcaacaacctccttcccaaaatgacgttgaaagaatcctcca

SEQ ID NO: 1156 - DNA, 200 bp, Digitaria sanguinalis
atgttatcttccagaggtgggaaaaggaaaccttctggaaacagcaaacgtaggcgtggttctttttcttttttgggtgggatgcagacgctcactgatgcactatgcaaagagattggaccccatgaatttaatctccaatcaaaggttcttgaaatgtcctacagctgcgatgataacgtggttggtaattggtcaat

SEQ ID NO: 1157 - DNA, 200 bp, Digitaria sanguinalis
attgaccaattaccaaccacgttatcatcgcagctgtaggacatttcaagaacctttgattggagattaaattcatggggtccaatctctttgcatagtgcatcagtgagcgtctgcatcccacccaaaaaagaaaaagaaccacgcctacgtttgctgtttccagaaggtttccttttcccacctctggaagataacat

SEQ ID NO: 1158 - DNA, 121 bp, Euphorbia heterophylla; identical to SEQ ID NO: 47

SEQ ID NO: 1159 - DNA, 121 bp, Euphorbia heterophylla
aaatttaaaaatttattagtgtaaaatatgggtgtgcaaatggttttggtaaccgcatttccgaatcgaatcagactgagttattaatttggtttggttactctgaaaattcggttcggtt

SEQ ID NO: 1160 - DNA, 200 bp, Euphorbia heterophylla
acaggttgtgcattccacccagaaacgtcagcgtggttcattttcgtttctgggtggaatgcagactcttcctgacaggttgtgcaaagagcttgcaaaagacgagcttagacttgagtcaaaggttttgtctttgtcttataatcacgattctagatcggcgttagacaattggtctgtctcttttgcttctaagggca

SEQ ID NO: 1161 - DNA, 200 bp, Euphorbia heterophylla
tgcccttagaagcaaaagagacagaccaattgtctaacgccgatctagaatcgtgattataagacaaagacaaaacctttgactcaagtctaagctcgtcttttgcaagctctttgcacaacctgtcaggaagagtctgcattccacccagaaacgaaaatgaaccacgctgacgtttctgggtggaatgcacaacctgt

SEQ ID NO: 1162 - DNA, 200 bp, Euphorbia heterophylla
tctgtctcttttgcttctaagggcaacaaacgtatgcaagactcgtcatatgatgccgtcattatgacggcaccactttgcaacctcaaagaaatgaggatcacaaaaggcagaaatcacttcctgttggactttattcccgaggtaatttatatgccactgtcggtcattattacgacgttcaagaaggagaatgtcaa

SEQ ID NO: 1163 - DNA, 200 bp, Euphorbia heterophylla
ttgacattctccttcttgaacgtcgtaataatgaccgacagtggcatataaattacctcgggaataaagtccaacaggaagtgatttctgccttttgtgatcctcatttctttgaggttgcaaagtggtgccgtcataatgacggcatcatatgacgagtcttgcatacgtttgttgcccttagaagcaaaagagacaga

SEQ ID NO: 1164 - DNA, 200 bp, Euphorbia heterophylla
acttttttacatgttcagggggttatttgaaacatttgaaagttcaaggggtaactagccctttttgaacaagttcaggggttttcatgtattaggcctctatttaatattggatgctccaattggacacctgagctttatgttgtcataattagtagtagatatagctttcttttaattttcacgtgtttttttcgtgt

SEQ ID NO: 1165 - DNA, 200 bp, Euphorbia heterophylla
acacgaaaaaaacacgtgaaaattaaaagaaagctatatctactactaattatgacaacataaagctcaggtgtccaattggagcatccaatattaaatagaggcctaatacatgaaaacccctgaacttgttcaaaaagggctagttaccccttgaactttcaaatgtttcaaataaccccctgaacatgtaaaaaagt

SEQ ID NO: 1166 - DNA, 200 bp, Euphorbia heterophylla
taattttcacgtgtttttttcgtgtaaatagaaagacagcgaacttgttgaagcagttgaccgtgatctgcgaaagatgctcataaatcccaatgcaaaggatccacttacacttggcgtaagagtgtggcctcaagccattccacagtttctgattggtcactacgatatcctagatacggcgaaaaatgcgttaagtg

SEQ ID NO: 1167 - DNA, 200 bp, Euphorbia heterophylla
cacttaacgcatttttcgccgtatctaggatatcgtagtgaccaatcagaaactgtggaatggcttgaggccacactcttacgccaagtgtaagtggatcctttgcattgggatttatgagcatctttcgcagatcacggtcaactgcttcaacaagttcgctgtctttctatttacacgaaaaaaacacgtgaaaatta

SEQ ID NO: 1168 - DNA, 200 bp, Euphorbia heterophylla
gatacggcgaaaaatgcgttaagtgaacaaggcttggaagggctgtttttagggggtaactatgtgtatggtgtagctttgggaaaatgtgttgaaggagcatatgaaactgcgtccagtgttactaatttcctaacccagtatacttataaatagtatctgatgagatttaagcaagagttcaattatgctgcggctaa

SEQ ID NO: 1169 - DNA, 200 bp, Euphorbia heterophylla
ttagccgcagcataattgaactcttgcttaaatctcatcagatactatttataagtatactgggttaggaaattagtaacactggacgcagtttcatatgctccttcaacacattttcccaaagctacaccatacacatagttaccccctaaaaacagcccttccaagccttgttcacttaacgcatttttcgccgtatc

SEQ ID NO: 1170 - DNA, 200 bp, Euphorbia heterophylla
aagagttcaattatgctgcggctaagtactgtgagtttattgagtagtgggtaaaaatgttgctttaggtctgttgtatttgtaatagttgcttcacgtttttcattaaggatggtgtattctctagttatgcattcttgttcatttagcaggcaaaacgagtttgatgtgcattcagaatatgttggcagttgattgac

SEQ ID NO: 1171 - DNA, 200 bp, Euphorbia heterophylla
gtcaatcaactgccaacatattctgaatgcacatcaaactcgttttgcctgctaaatgaacaagaatgcataactagagaatacaccatccttaatgaaaaacgtgaagcaactattacaaatacaacagacctaaagcaacatttttacccactactcaataaactcacagtacttagccgcagcataattgaactctt

SEQ ID NO: 1172 - DNA, 200 bp, Euphorbia heterophylla
agattagtgaatgatcacaacaaataccgtttgataagtccaattttttctttttttgcaagatttggttctattatagctggggcaattcagtcaaatttttcctcgaaaaaggataagagcaaggagacaaattcatcaagacataagaaacgtcagcgtggttcattttcgtttctgggtggaatgcaggtattaga

SEQ ID NO: 1173 - DNA, 200 bp, Euphorbia heterophylla
tctaatacctgcattccacccagaaacgaaaatgaaccacgctgacgtttcttatgtcttgatgaatttgtctccttgctcttatcctttttcgaggaaaaatttgactgaattgccccagctataatagaaccaaatcttgcaaaaaaagaaaaaattggacttatcaaacggtatttgttgtgatcattcactaatct

SEQ ID NO: 1174 - DNA, 200 bp, Euphorbia heterophylla
ttctgggtggaatgcaggtattagatgtaggatattacttatgaactctgaaatttgtatctaatatcacttttcttaaagcccctaaatgattttaatattaggattttctttttgtatctagctttattatttgctcgattttactcgttaaagctatgtttatttgttgagaagccttctagaggcgatacagattt

SEQ ID NO: 1175 - DNA, 200 bp, Euphorbia heterophylla
aaatctgtatcgcctctagaaggcttctcaacaaataaacatagctttaacgagtaaaatcgagcaaataataaagctagatacaaaaagaaaatcctaatattaaaatcatttaggggctttaagaaaagtgatattagatacaaatttcagagttcataagtaatatcctacatctaatacctgcattccacccagaa

SEQ ID NO: 1176 - DNA, 200 bp, Euphorbia heterophylla
agccttctagaggcgatacagattttcttagcttatgcaagtgattatcctatgaactatttatgttttcttttcccgaatctatttttctttgcagactcttcctgacaggttgtgcaaagagcttgctaaagacgagcttagacttgggtcaaaggttttgtctttgtcttataatcacgattctagatcggcgttag

SEQ ID NO: 1177 - DNA, 200 bp, Euphorbia heterophylla
ctaacgccgatctagaatcgtgattataagacaaagacaaaacctttgacccaagtctaagctcgtctttagcaagctctttgcacaacctgtcaggaagagtctgcaaagaaaaatagattcgggaaaagaaaacataaatagttcataggataatcacttgcataagctaagaaaatctgtatcgcctctagaaggct

SEQ ID NO: 1178 - DNA, 200 bp, Euphorbia heterophylla
aatcacgattctagatcggcgttagacaattggtctgtctcttttgcttctaagggcgacaaacgtatgcaaaactcgtcatatgatgctgtcattatgacggttagcaacttctttactgatgatataatgtttatcaattaatctttttgatatcgaaacgaaacaatttcattgtttactcagattcattatcactt

SEQ ID NO: 1179 - DNA, 200 bp, Euphorbia heterophylla
aagtgataatgaatctgagtaaacaatgaaattgtttcgtttcgatatcaaaaagattaattgataaacattatatcatcagtaaagaagttgctaaccgtcataatgacagcatcatatgacgagttttgcatacgtttgtcgcccttagaagcaaaagagacagaccaattgtctaacgccgatctagaatcgtgatt

SEQ ID NO: 1180 - DNA, 200 bp, Euphorbia heterophylla
tgtttactcagattcattatcacttctaaaatttcaggcaccactttgcaacctcaaagaaatgaggatcacaaaaggcagaaatcacttcccgttggactttattcccgaggtacccttcttgcaaatctattgacaagaatggatgtcaataattcaaccgaaaccatatgaactattgcaggtaatttatatgccac

SEQ ID NO: 1181 - DNA, 200 bp, Euphorbia heterophylla
gtggcatataaattacctgcaatagttcatatggtttcggttgaattattgacatccattcttgtcaatagatttgcaagaagggtacctcgggaataaagtccaacgggaagtgatttctgccttttgtgatcctcatttctttgaggttgcaaagtggtgcctgaaattttagaagtgataatgaatctgagtaaaca

SEQ ID NO: 1182 - DNA, 200 bp, Euphorbia heterophylla
attgcgtgattgtaggaggtggaatcactggtctctgcattgctcaggcacttgccactaagcaccggaatgttgctcccaacgttattgtcaccgaggctagagatcgcgtcggtggcaacatcaacaccgttgaaagggacggctatctctgggaagaggggcctaacagtttccagccctccgatcctatgctaacc

SEQ ID NO: 1183 - DNA, 200 bp, Euphorbia heterophylla
ggttagcataggatcggagggctggaaactgttaggcccctcttcccagagatagccgtccctttcaacggtgttgatgttgccaccgacgcgatctctagcctcggtgacaataacgttgggagcaacattccggtgcttagtggcaagtgcctgagcaatgcagagaccagtgattccacctcctacaatcacgcaat

SEQ ID NO: 1184 - DNA, 200 bp, Euphorbia heterophylla
ccagccctccgatcctatgctaaccatggcggtggatagtggtttgaaggatgacctagttttgggggatcctacagcgccacggtttgtattgtgggatgggcaattgaggccagttccttctaagccaagtgacttgccgttctttgatttgatgagcattggtggaaaactcagagctggttttggtgctcttggac

SEQ ID NO: 1185 - DNA, 200 bp, Euphorbia heterophylla
gtccaagagcaccaaaaccagctctgagttttccaccaatgctcatcaaatcaaagaacggcaagtcacttggcttagaaggaactggcctcaattgcccatcccacaatacaaaccgtggcgctgtaggatcccccaaaactaggtcatccttcaaaccactatccaccgccatggttagcataggatcggagggctgg

SEQ ID NO: 1186 - DNA, 200 bp, Euphorbia heterophylla
agagctggttttggtgctcttggacttcggcctccacctccaggacgtgaggaatcagttgaagagtttgtgcgccgcaaccttggagatgaagttttcgagcgtttgattgagccattttgttcaggtgtttatgcaggtgatcctgcaaaactcagcatgaaagcagcattcggaaaagtttggatgctggaacaaaa

SEQ ID NO: 1187 - DNA, 200 bp, Euphorbia heterophylla
ttttgttccagcatccaaacttttccgaatgctgctttcatgctgagttttgcaggatcacctgcataaacacctgaacaaaatggctcaatcaaacgctcgaaaacttcatctccaaggttgcggcgcacaaactcttcaactgattcctcacgtcctggaggtggaggccgaagtccaagagcaccaaaaccagctct

SEQ ID NO: 1188 - DNA, 200 bp, Euphorbia heterophylla
gaaaagtttggatgctggaacaaaatggaggcagtatcattggtggcacttttaaagcaatccaggaaaggaataaaaatcccaagcctcctcgagacccgcgtctaccaaaaccaaagggccaaacagtagggtcttttaggaagggactgactatgcttccagaggcaattgcatcaagtttgggtagtaatatcaag

SEQ ID NO: 1189 - DNA, 200 bp, Euphorbia heterophylla
cttgatattactacccaaacttgatgcaattgcctctggaagcatagtcagtcccttcctaaaagaccctactgtttggccctttggttttggtagacgcgggtctcgaggaggcttgggatttttattcctttcctggattgctttaaaagtgccaccaatgatactgcctccattttgttccagcatccaaacttttc

SEQ ID NO: 1190 - DNA, 200 bp, Euphorbia heterophylla
atcaagtttgggtagtaatatcaagttatcttggaagcttctgggtatctctaaattggacaatcgggagtacagtttaacatatgaaacacctgaaggatcagttactgtgcagagcaagagtgtcgtacttacaattccatcccatattgccagcaatatcctgaatcctctttctacaactgctgctgaggcactgt

SEQ ID NO: 1191 - DNA, 200 bp, Euphorbia heterophylla
acagtgcctcagcagcagttgtagaaagaggattcaggatattgctggcaatatgggatggaattgtaagtacgacactcttgctctgcacagtaactgatccttcaggtgtttcatatgttaaactgtactcccgattgtccaatttagagatacccagaagcttccaagataacttgatattactacccaaacttgat

SEQ ID NO: 1192 - DNA, 200 bp, Euphorbia heterophylla
tctacaactgctgctgaggcactgtcaaaattttattacccaccagtagctgctgtgtctatttcatacccgaaagatgcaattcggacagaacgtttaatagatggcgagcttaagggatttggtcagttgcatcctcgtagtcaaggagtggaaactttaggaaccatatacagctcatcacttttccctaaccgagc

SEQ ID NO: 1193 - DNA, 200 bp, Euphorbia heterophylla
gctcggttagggaaaagtgatgagctgtatatggttcctaaagtttccactccttgactacgaggatgcaactgaccaaatcccttaagctcgccatctattaaacgttctgtccgaattgcatctttcgggtatgaaatagacacagcagctactggtgggtaataaaattttgacagtgcctcagcagcagttgtaga

SEQ ID NO: 1194 - DNA, 200 bp, Euphorbia heterophylla
gctcatcacttttccctaaccgagcaccagatggaagaattttgctcttgaattacattgggggtgctaccaatcctggaatattggccaagaaagacagcgaacttgttgaagcagttgaccgtgatctgcgaaagatgctcataaatcccaatgcaaaggatccacttacacttggcgtaagagtgtggcctcaagcc

SEQ ID NO: 1195 - DNA, 200 bp, Euphorbia heterophylla
ggcttgaggccacactcttacgccaagtgtaagtggatcctttgcattgggatttatgagcatctttcgcagatcacggtcaactgcttcaacaagttcgctgtctttcttggccaatattccaggattggtagcacccccaatgtaattcaagagcaaaattcttccatctggtgctcggttagggaaaagtgatgagc

SEQ ID NO: 1196 - DNA, 200 bp, Euphorbia heterophylla
tggcgtaagagtgtggcctcaagccattccacagtttctgattggtcactacgatatcctagatacggcgaaaaatgcgttaagtgaacaaggcttggaagggctgtttttagggggtaactatgtgtatggtgtagctttgggaaaatgtgttgaaggagcatatgaaactgcgtccagtgttactaatttcctaaccc

SEQ ID NO: 1197 - DNA, 200 bp, Euphorbia heterophylla
gggttaggaaattagtaacactggacgcagtttcatatgctccttcaacacattttcccaaagctacaccatacacatagttaccccctaaaaacagcccttccaagccttgttcacttaacgcatttttcgccgtatctaggatatcgtagtgaccaatcagaaactgtggaatggcttgaggccacactcttacgcca

SEQ ID NO: 1198 - DNA, 200 bp, Euphorbia heterophylla
tccagtgttactaatttcctaacccagtatacttataaatagtatctgatgagatttaagcaagagttcaattatgctgcggctaagtactgtgagtttattgagtagtgggtaaaaatgttgctttaggtctgttgtatttgtaatagttgcttcacgtttttcattaaggatggtgtattctctagttatgcattctt

SEQ ID NO: 1199 - DNA, 200 bp, Euphorbia heterophylla
aagaatgcataactagagaatacaccatccttaatgaaaaacgtgaagcaactattacaaatacaacagacctaaagcaacatttttacccactactcaataaactcacagtacttagccgcagcataattgaactcttgcttaaatctcatcagatactatttataagtatactgggttaggaaattagtaacactgga

SEQ ID NO: 1200 - DNA, 200 bp, Euphorbia heterophylla
tacactaataaatttttaaatttaaatacaataaattgtataatcatatataaatttatcaatttatttctttaaaatctataaaaaaaagttaataaaatactatctacagcccttggaaatgattccataaacctaatccgagtacggagttctaaaatacggattgaaccagacttggaataatacttttgtcgaaa

SEQ ID NO: 1201 - DNA, 200 bp, Euphorbia heterophylla
tttcgacaaaagtattattccaagtctggttcaatccgtattttagaactccgtactcggattaggtttatggaatcatttccaagggctgtagatagtattttattaacttttttttatagattttaaagaaataaattgataaatttatatatgattatacaatttattgtatttaaatttaaaaatttattagtgta

SEQ ID NO: 1202 - DNA, 200 bp, Euphorbia heterophylla
acttggaataatacttttgtcgaaagcccagaaagtctgggtccgctcgattaacatgtcaaaacaatagaagaaaatatctttttattttcgtgtaaatgaatttaccagtaaggttgcgtttatcatttgtagccttcgtccaatcagattgacacgctatatttctccttgtcaattgaagataacacagcactatt

SEQ ID NO: 1203 - DNA, 200 bp, Euphorbia heterophylla
aatagtgctgtgttatcttcaattgacaaggagaaatatagcgtgtcaatctgattggacgaaggctacaaatgataaacgcaaccttactggtaaattcatttacacgaaaataaaaagatattttcttctattgttttgacatgttaatcgagcggacccagactttctgggctttcgacaaaagtattattccaagt

SEQ ID NO: 1204 - DNA, 200 bp, Euphorbia heterophylla
caattgaagataacacagcactatttccctattagttctgaggccgccactaaacggcggtgcgcttgcctcttaccaccacctttcgccgccatggcctctatttccgacttgtctcttttccggccaacaccttctcttgttccatcattttccaaacgcaatttaaacaactctatccacaaacaattcaaactccg

SEQ ID NO: 1205 - DNA, 200 bp, Euphorbia heterophylla
cggagtttgaattgtttgtggatagagttgtttaaattgcgtttggaaaatgatggaacaagagaaggtgttggccggaaaagagacaagtcggaaatagaggccatggcggcgaaaggtggtggtaagaggcaagcgcaccgccgtttagtggcggcctcagaactaatagggaaatagtgctgtgttatcttcaattg

SEQ ID NO: 1206 - DNA, 200 bp, Euphorbia heterophylla
ctatccacaaacaattcaaactccgatgctcaattacagagcagccttccacaatttccccatccaatcccggagacaaatccttatccggcaacggacattccgcctcagtagattgcgtgattgtaggaggtggaatcactggtctctgcattgctcaggcactcgccactaagcaccggaatgttgctcccaatgtt

SEQ ID NO: 1207 - DNA, 200 bp, Euphorbia heterophylla
aacattgggagcaacattccggtgcttagtggcgagtgcctgagcaatgcagagaccagtgattccacctcctacaatcacgcaatctactgaggcggaatgtccgttgccggataaggatttgtctccgggattggatggggaaattgtggaaggctgctctgtaattgagcatcggagtttgaattgtttgtggatag

SEQ ID NO: 1208 - DNA, 200 bp, Euphorbia heterophylla
gcaccggaatgttgctcccaatgttattgtcaccgaggctagagatcgcgtcggtggcaacatcaacaccgttgaaagggacggctatctctgggaagaggggcctaacagtttccagccctccgatcctatgctaaccatggcggtgaggatccaatttctaattgattgtcatgtctaacaaattattgacgaaattt

SEQ ID NO: 1209 - DNA, 200 bp, Euphorbia heterophylla
aaatttcgtcaataatttgttagacatgacaatcaattagaaattggatcctcaccgccatggttagcataggatcggagggctggaaactgttaggcccctcttcccagagatagccgtccctttcaacggtgttgatgttgccaccgacgcgatctctagcctcggtgacaataacattgggagcaacattccggtgc

SEQ ID NO: 1210 - DNA, 200 bp, Euphorbia heterophylla
gtctaacaaattattgacgaaatttgcttgtaattggagattttggttgaattagctaatttgatcgtattgtaggtggatagtggtttgaaggatgacctagttttgggggatcctactgcgccacggtttgtattgtgggatggacaattgaggccagttccttctaagccaagtgacttgccgttctttgatttgat

SEQ ID NO: 1211 - DNA, 200 bp, Euphorbia heterophylla
atcaaatcaaagaacggcaagtcacttggcttagaaggaactggcctcaattgtccatcccacaatacaaaccgtggcgcagtaggatcccccaaaactaggtcatccttcaaaccactatccacctacaatacgatcaaattagctaattcaaccaaaatctccaattacaagcaaatttcgtcaataatttgttagac

SEQ ID NO: 1212 - DNA, 200 bp, Euphorbia heterophylla
gtgacttgccgttctttgatttgatgagcattggtggaaaactcagagctggttttggtgctcttggacttcggcctccacctccagtttgtcctctttaactttcttattgtaattgttctccgattgaaaatagttccccgtgtgtaattttatctgctcgaaaccttacaattctgctgaaagtgacagggacgtga

SEQ ID NO: 1213 - DNA, 200 bp, Euphorbia heterophylla
tcacgtccctgtcactttcagcagaattgtaaggtttcgagcagataaaattacacacggggaactattttcaatcggagaacaattacaataagaaagttaaagaggacaaactggaggtggaggccgaagtccaagagcaccaaaaccagctctgagttttccaccaatgctcatcaaatcaaagaacggcaagtcac

SEQ ID NO: 1214 - DNA, 200 bp, Euphorbia heterophylla
tctgctgaaagtgacagggacgtgaggaatcagttgaagagtttgtgcgccgcaaccttggagatgaagttttcgagcgtttgattgagccattttgttcaggtaagttaagatatttgtagcttgtagtgttcttattagttgacactgtatcatgtcaagttgtgttatcagacccaatacaacatcttactaatcat

SEQ ID NO: 1215 - DNA, 200 bp, Euphorbia heterophylla
atgattagtaagatgttgtattgggtctgataacacaacttgacatgatacagtgtcaactaataagaacactacaagctacaaatatcttaacttacctgaacaaaatggctcaatcaaacgctcgaaaacttcatctccaaggttgcggcgcacaaactcttcaactgattcctcacgtccctgtcactttcagcaga

SEQ ID NO: 1216 - DNA, 200 bp, Euphorbia heterophylla
cccaatacaacatcttactaatcatcacatgaatattgctgtatttcccatgtaaaattaaaccgatacaacatacctcgacttaaattgatgaatacaattcaatgtagtggtacttagttgacgtccctcttggttcgacgacctcttttaattatgatatgttgtgtttatctaaacactaatttatgaatttcatt

SEQ ID NO: 1217 - DNA, 200 bp, Euphorbia heterophylla
aatgaaattcataaattagtgtttagataaacacaacatatcataattaaaagaggtcgtcgaaccaagagggacgtcaactaagtaccactacattgaattgtattcatcaatttaagtcgaggtatgttgtatcggtttaattttacatgggaaatacagcaatattcatgtgatgattagtaagatgttgtattggg

SEQ ID NO: 1218 - DNA, 200 bp, Euphorbia heterophylla
taaacactaatttatgaatttcattcaaaatctatgccattgttaatacaaatcattatcaaacttgaaatgaattccattattgaagtttatattgcatgctcaatctgatatttgattcatttatttaagtagtcctttagcgtgcatatcgtgaatggttccttgagatgtgcttttgatcatgtagcatccatcat

SEQ ID NO: 1219 - DNA, 200 bp, Euphorbia heterophylla
atgatggatgctacatgatcaaaagcacatctcaaggaaccattcacgatatgcacgctaaaggactacttaaataaatgaatcaaatatcagattgagcatgcaatataaacttcaataatggaattcatttcaagtttgataatgatttgtattaacaatggcatagattttgaatgaaattcataaattagtgttta

SEQ ID NO: 1220 - DNA, 200 bp, Euphorbia heterophylla
cttttgatcatgtagcatccatcatggtgatggcttatttgttctagctatatataagatgataagagaatgactaaatgggtaacttgtctatgctgtccagaggtgtttaattgctttgcagtatctgaaaaagagtcagttggtttccctatgatgtatgcttctcaaacttaaaatcgccctagttgattttgttg

SEQ ID NO: 1221 - DNA, 200 bp, Euphorbia heterophylla
caacaaaatcaactagggcgattttaagtttgagaagcatacatcatagggaaaccaactgactctttttcagatactgcaaagcaattaaacacctctggacagcatagacaagttacccatttagtcattctcttatcatcttatatatagctagaacaaataagccatcaccatgatggatgctacatgatcaaaag

SEQ ID NO: 1222 - DNA, 200 bp, Euphorbia heterophylla
aaaatcgccctagttgattttgttgctaaagtcggaagttttatttgtataatttgtatatcttgacaaggttgtccttaatgggagatgctatttttcatgtgcaggtgtttatgcaggtgatcctgcaaaactcagcatgaaagcagcattcggaaaagtttggatgctggaacaaaatggaggcagtatcattggtg

SEQ ID NO: 1223 - DNA, 200 bp, Euphorbia heterophylla
caccaatgatactgcctccattttgttccagcatccaaacttttccgaatgctgctttcatgctgagttttgcaggatcacctgcataaacacctgcacatgaaaaatagcatctcccattaaggacaaccttgtcaagatatacaaattatacaaataaaacttccgactttagcaacaaaatcaactagggcgatttt

SEQ ID NO: 1224 - DNA, 200 bp, Euphorbia heterophylla
caaaatggaggcagtatcattggtggcacttttaaagcaatccaggaaaggaataaaaatcccaagcctcctcgagacccgtatatttatctccttgctttgagaatatcttacatcttttgtttttgtttagtttcttgactctagtgccctgcaggcgtctaccaaaaccaaagggccaaacagtagggtcttttagg

SEQ ID NO: 1225 - DNA, 200 bp, Euphorbia heterophylla
cctaaaagaccctactgtttggccctttggttttggtagacgcctgcagggcactagagtcaagaaactaaacaaaaacaaaagatgtaagatattctcaaagcaaggagataaatatacgggtctcgaggaggcttgggatttttattcctttcctggattgctttaaaagtgccaccaatgatactgcctccattttg

SEQ ID NO: 1226 - DNA, 200 bp, Euphorbia heterophylla
gggccaaacagtagggtcttttaggaagggactgactatgcttccagaggcaattgcatcaaggtaacatttccaccggaattgaattttatgaactttagatggttgtaataattcttgacagtggctgaagtaattgactgattacctgcattggtgttgcagtttgggtagtaatatcaagttatcttggaagcttc

SEQ ID NO: 1227 - DNA, 200 bp, Euphorbia heterophylla
gaagcttccaagataacttgatattactacccaaactgcaacaccaatgcaggtaatcagtcaattacttcagccactgtcaagaattattacaaccatctaaagttcataaaattcaattccggtggaaatgttaccttgatgcaattgcctctggaagcatagtcagtcccttcctaaaagaccctactgtttggccc

SEQ ID NO: 1228 - DNA, 200 bp, Euphorbia heterophylla
tttattgtgtaataattaaaggataatattactgtaaaataatttatattatttaatataataattttaatattattatttttccttaaaagaattataaatgagcttgtaatgttcatgaacaatccatgaataagccaattgttaaatagaccattcatgaatatgcattttgagctcgaattaaactcagcttattt

SEQ ID NO: 1229 - DNA, 200 bp, Euphorbia heterophylla
aaataagctgagtttaattcgagctcaaaatgcatattcatgaatggtctatttaacaattggcttattcatggattgttcatgaacattacaagctcatttataattcttttaaggaaaaataataatattaaaattattatattaaataatataaattattttacagtaatattatcctttaattattacacaataaa

SEQ ID NO: 1230 - DNA, 200 bp, Euphorbia heterophylla
agctcgaattaaactcagcttatttacattgttgtacatgtgaaatcaagagaatgctcataaagtgagtattaaaccgaaacattttatatttcttaaaggtctgacacatgaattctgagaaatcaaatctgtaatattttgacaaatgaaataaatcgtaaaatacatatattcattttagtaaaatctctaaattt

SEQ ID NO: 1231 - DNA, 200 bp, Euphorbia heterophylla
aaatttagagattttactaaaatgaatatatgtattttacgatttatttcatttgtcaaaatattacagatttgatttctcagaattcatgtgtcagacctttaagaaatataaaatgtttcggtttaatactcactttatgagcattctcttgatttcacatgtacaacaatgtaaataagctgagtttaattcgagct

SEQ ID NO: 1232 - DNA, 200 bp, Euphorbia heterophylla
tcattttagtaaaatctctaaatttttaattctttcaatcttaacatcttcttcctcaaatccttgtaacaaatcacagcacaatattttagcattcaaattcatagaatataattaaccgttcaaatctaccaatcccacctccttacccacagcttctactccgagtccattcattaaccctcctctctttgttacaa

SEQ ID NO: 1233 - DNA, 200 bp, Euphorbia heterophylla
ttgtaacaaagagaggagggttaatgaatggactcggagtagaagctgtgggtaaggaggtgggattggtagatttgaacggttaattatattctatgaatttgaatgctaaaatattgtgctgtgatttgttacaaggatttgaggaagaagatgttaagattgaaagaattaaaaatttagagattttactaaaatga

SEQ ID NO: 1234 - DNA, 200 bp, Euphorbia heterophylla
attaaccctcctctctttgttacaaattcttccatgtcttatttttactaaaatctatgctatctatgtttcctaaaattattccacctgctttcagttttaataaaacttcagatactttgaagaactccaacactccattaaatgagaccaagtttcgcaagtcgggctaccctttgttgggcccaagcgcaatttgg

SEQ ID NO: 1235 - DNA, 200 bp, Euphorbia heterophylla
ccaaattgcgcttgggcccaacaaagggtagcccgacttgcgaaacttggtctcatttaatggagtgttggagttcttcaaagtatctgaagttttattaaaactgaaagcaggtggaataattttaggaaacatagatagcatagattttagtaaaaataagacatggaagaatttgtaacaaagagaggagggttaat

SEQ ID NO: 1236 - DNA, 200 bp, Euphorbia heterophylla
tttgttgggcccaagcgcaatttggacacctattttttactaagttcggcttaagcctcagcccgtcaaaatttaaagttttatgcgttgagctgggttttttacaattatccgagcctaatccgataaataataatttaattttttttatatattatatattgtactaaataattatttcaatatttatatttcaaagt

SEQ ID NO: 1237 - DNA, 200 bp, Euphorbia heterophylla
actttgaaatataaatattgaaataattatttagtacaatatataatatataaaaaaaattaaattattatttatcggattaggctcggataattgtaaaaaacccagctcaacgcataaaactttaaattttgacgggctgaggcttaagccgaacttagtaaaaaataggtgtccaaattgcgcttgggcccaacaaa

SEQ ID NO: 1238 - DNA, 200 bp, Euphorbia heterophylla
tatttcaatatttatatttcaaagttatgggtgtgcatctggttaaaacctaatagaatcgaataaatcgaatatcaaatagagaaaccaaaccaaatacgaatcaaaatcgaattaaccaaatcaaaaataaattattccgtttggttaaaaaccgaaccaaaccaaatttttttaaaaaacaaacttaaattaaaaat

SEQ ID NO: 1239 - DNA, 200 bp, Euphorbia heterophylla
atttttaatttaagtttgttttttaaaaaaatttggtttggttcggtttttaaccaaacggaataatttatttttgatttggttaattcgattttgattcgtatttggtttggtttctctatttgatattcgatttattcgattctattaggttttaaccagatgcacacccataactttgaaatataaatattgaaata

SEQ ID NO: 1240 - DNA, 200 bp, Euphorbia heterophylla
taaaaaacaaacttaaattaaaaattttaactcttaaaatccaaaaataagtattacaatagttcaaatgacttagttttgacacataaatgaatgagggtgcattttggggtttgatgttaaaatgatctatatttgagcattattagtagaatattttaaatttttattatgatatttcaattcgattcggttattgt

SEQ ID NO: 1241 - DNA, 200 bp, Euphorbia heterophylla
acaataaccgaatcgaattgaaatatcataataaaaatttaaaatattctactaataatgctcaaatatagatcattttaacatcaaaccccaaaatgcaccctcattcatttatgtgtcaaaactaagtcatttgaactattgtaatacttatttttggattttaagagttaaaatttttaatttaagtttgtttttta

SEQ ID NO: 1242 - DNA, 200 bp, Euphorbia heterophylla
tatttcaattcgattcggttattgtagttttttcaacactaaaactgaactgaaaattgaaatgtttaactttaataaataaaccgaaccgaattttcaaagtaaccgaaccaaattaataactcagtcttattcgattcggaaatgtagttaccaaaaccatttgcacacccatattttacactaatgaatttttaaac

SEQ ID NO: 1243 - DNA, 200 bp, Euphorbia heterophylla
gtttaaaaattcattagtgtaaaatatgggtgtgcaaatggttttggtaactacatttccgaatcgaataagactgagttattaatttggttcggttactttgaaaattcggttcggtttatttattaaagttaaacatttcaattttcagttcagttttagtgttgaaaaaactacaataaccgaatcgaattgaaata

SEQ ID NO: 1244 - DNA, 200 bp, Euphorbia heterophylla
attttacactaatgaatttttaaacttaaatacaataaattgtataaattattaaaaatttcaaataaataatataatcatacgtaattttgtcaatttatttcttaaaatctataaaaaaaaaagttattaaaatactatctacagcctttggaaatgattccataagcctgatccgagcacggagttctaaaatacgg

SEQ ID NO: 1245 - DNA, 200 bp, Euphorbia heterophylla
ccgtattttagaactccgtgctcggatcaggcttatggaatcatttccaaaggctgtagatagtattttaataacttttttttttatagattttaagaaataaattgacaaaattacgtatgattatattatttatttgaaatttttaataatttatacaatttattgtatttaagtttaaaaattcattagtgtaaaat

SEQ ID NO: 1246 - DNA, 200 bp, Euphorbia heterophylla
ccgagcacggagttctaaaatacggattgaagcagacttggaatgatacttttgtcgaaagcccacaaagtctggcctgttcgattaacatgtcaaaacaatagaagaaaatatctttttattttcgtgtaaatgaatttaccagtaaggttgcgtttatcatttgtagccttcgtccaatcagattgacacgctatatt

SEQ ID NO: 1247 - DNA, 200 bp, Euphorbia heterophylla
aatatagcgtgtcaatctgattggacgaaggctacaaatgataaacgcaaccttactggtaaattcatttacacgaaaataaaaagatattttcttctattgttttgacatgttaatcgaacaggccagactttgtgggctttcgacaaaagtatcattccaagtctgcttcaatccgtattttagaactccgtgctcgg

SEQ ID NO: 1248 - DNA, 200 bp, Euphorbia heterophylla
tccaatcagattgacacgctatatttctccttgtcaattgaagataacacagcactatttccctattagttctgaggccgccactaaacggagtgcgcttgcctcttaccaccacctttcgccgccatggcctctatttccgacttgtctcttttccggccaacaccttctcttgttccatcattttccaaacgcaattt

SEQ ID NO: 1249 - DNA, 200 bp, Euphorbia heterophylla
aaattgcgtttggaaaatgatggaacaagagaaggtgttggccggaaaagagacaagtcggaaatagaggccatggcggcgaaaggtggtggtaagaggcaagcgcactccgtttagtggcggcctcagaactaatagggaaatagtgctgtgttatcttcaattgacaaggagaaatatagcgtgtcaatctgattgga

SEQ ID NO: 1250 - DNA, 200 bp, Euphorbia heterophylla
ttccatcattttccaaacgcaatttaaacaactctatccacaaacaattcaaactccgatgctcaattacagagcagccttccacaatttccccatccaatcccggagacaaatccttatccggcaacggacattccgcctcagtagattgcgtgattgtaggaggtggaatcactggtctctgcattgctcaggcactt

SEQ ID NO: 1251 - DNA, 200 bp, Euphorbia heterophylla
aagtgcctgagcaatgcagagaccagtgattccacctcctacaatcacgcaatctactgaggcggaatgtccgttgccggataaggatttgtctccgggattggatggggaaattgtggaaggctgctctgtaattgagcatcggagtttgaattgtttgtggatagagttgtttaaattgcgtttggaaaatgatggaa

SEQ ID NO: 1252 - DNA, 200 bp, Euphorbia heterophylla
tggtctctgcattgctcaggcacttgccactaagcaccggaatgttgctcccaacgttattgtcaccgaggctagagatcgcgtcggtggcaacatcaacaccgttgaaagggacggctatctctgggaagaggggcctaacagtttccagccctccgatcctatgctaaccatggcggtgaggatccaatttctaattg

SEQ ID NO: 1253 - DNA, 200 bp, Euphorbia heterophylla
caattagaaattggatcctcaccgccatggttagcataggatcggagggctggaaactgttaggcccctcttcccagagatagccgtccctttcaacggtgttgatgttgccaccgacgcgatctctagcctcggtgacaataacgttgggagcaacattccggtgcttagtggcaagtgcctgagcaatgcagagacca

SEQ ID NO: 1254 - DNA, 200 bp, Euphorbia heterophylla
gcggtgaggatccaatttctaattgattgtcatgtctaacaaattattgacgaaatttgcttgtaattggagattttggttgaattagctaatttgatcgtattgtaggtggatagtggtttgaaggatgacctagttttgggggatcctactgcgccacggtttgtattgtgggatgggcaattgaggccagttccttc

SEQ ID NO: 1255 - DNA, 200 bp, Euphorbia heterophylla
gaaggaactggcctcaattgcccatcccacaatacaaaccgtggcgcagtaggatcccccaaaactaggtcatccttcaaaccactatccacctacaatacgatcaaattagctaattcaaccaaaatctccaattacaagcaaatttcgtcaataatttgttagacatgacaatcaattagaaattggatcctcaccgc

SEQ ID NO: 1256 - DNA, 200 bp, Euphorbia heterophylla
atgggcaattgaggccagttccttctaagccaagtgacttgccgttctttgatttgatgagcattggtggaaaactcagagctggttttggtgctcttggacttcggcctccacctccagtttgtcctctttaactttcttattgtaattgttctccgattgaaaatagtcccccgtgtgtaattttatctgctcgtaac

SEQ ID NO: 1257 - DNA, 200 bp, Euphorbia heterophylla
gttacgagcagataaaattacacacgggggactattttcaatcggagaacaattacaataagaaagttaaagaggacaaactggaggtggaggccgaagtccaagagcaccaaaaccagctctgagttttccaccaatgctcatcaaatcaaagaacggcaagtcacttggcttagaaggaactggcctcaattgcccat

SEQ ID NO: 1258 - DNA, 200 bp, Euphorbia heterophylla
gtgtgtaattttatctgctcgtaaccttacaattctgctgaaagtgacagggacgtgaggaatcagttgaagagtttgtgcgccgcaaccttggagatgaagttttcgagcgtttgattgagccattttgttcaggtaagttaagatatttggagcttgtagtgttcttattagttgacactgtatcatgtcaagttgtg

SEQ ID NO: 1259 - DNA, 200 bp, Euphorbia heterophylla
cacaacttgacatgatacagtgtcaactaataagaacactacaagctccaaatatcttaacttacctgaacaaaatggctcaatcaaacgctcgaaaacttcatctccaaggttgcggcgcacaaactcttcaactgattcctcacgtccctgtcactttcagcagaattgtaaggttacgagcagataaaattacacac

SEQ ID NO: 1260 - DNA, 200 bp, Euphorbia heterophylla
tgacactgtatcatgtcaagttgtgttatcagacccattacaacatcttaccaatcatcacatgaatattgctgtatttcccatgtaaaattaaaccgatacaacatacctcgacttaaattgacgaatacaattcaatgtagtggtacttagttgacgtcccttttggttcgacgacctcttttaattatgatatgttg

SEQ ID NO: 1261 - DNA, 200 bp, Euphorbia heterophylla
caacatatcataattaaaagaggtcgtcgaaccaaaagggacgtcaactaagtaccactacattgaattgtattcgtcaatttaagtcgaggtatgttgtatcggtttaattttacatgggaaatacagcaatattcatgtgatgattggtaagatgttgtaatgggtctgataacacaacttgacatgatacagtgtca

SEQ ID NO: 1262 - DNA, 200 bp, Euphorbia heterophylla
gacctcttttaattatgatatgttgtgttatatctaaacactaaattatgaatttcattcaaaatctatgccattgttaatacaaatcattatcaaacttgaagtgaattccattattgaagtttatattgcatgctcaatctcatccatctgatatttgattcatttatttaagtagtcctttagcgtgcatatcgtga

SEQ ID NO: 1263 - DNA, 200 bp, Euphorbia heterophylla
tcacgatatgcacgctaaaggactacttaaataaatgaatcaaatatcagatggatgagattgagcatgcaatataaacttcaataatggaattcacttcaagtttgataatgatttgtattaacaatggcatagattttgaatgaaattcataatttagtgtttagatataacacaacatatcataattaaaagaggtc

SEQ ID NO: 1264 - DNA, 200 bp, Euphorbia heterophylla
tagtcctttagcgtgcatatcgtgaatggttccttgagatgtgcttttgatcatgtagcatccatcatggtgatggcttatttgttctagctatatataagatgataagagaatgactaaatgggtaacttgtctatgctgtccagaggtgtttaattgctttgcagtatctgaaaaagagtcagttggtttccctatga

SEQ ID NO: 1265 - DNA, 200 bp, Euphorbia heterophylla
tcatagggaaaccaactgactctttttcagatactgcaaagcaattaaacacctctggacagcatagacaagttacccatttagtcattctcttatcatcttatatatagctagaacaaataagccatcaccatgatggatgctacatgatcaaaagcacatctcaaggaaccattcacgatatgcacgctaaaggacta

SEQ ID NO: 1266 - DNA, 200 bp, Euphorbia heterophylla
aaagagtcagttggtttccctatgatgtatgcttctcaaacttaaaatcgccctagttgattttgttgctaaattcggaagttttatttgtataatttgtatatcttgacaaggttgtccttaatgggagatgctatttttcatgtgcaggtgtttatgcaggtgatcctgcaaaactcagcatgaaagcagcattcgga

SEQ ID NO: 1267 - DNA, 200 bp, Euphorbia heterophylla
tccgaatgctgctttcatgctgagttttgcaggatcacctgcataaacacctgcacatgaaaaatagcatctcccattaaggacaaccttgtcaagatatacaaattatacaaataaaacttccgaatttagcaacaaaatcaactagggcgattttaagtttgagaagcatacatcatagggaaaccaactgactcttt

SEQ ID NO: 1268 - DNA, 200 bp, Euphorbia heterophylla
actcagcatgaaagcagcattcggaaaagtttggatgctggaacaaaatggaggcagtatcattggtggcacttttaaagcaatccaggaaaggaataaaaatcccaagcctcctcgagacccgtatatttatctccttgctttgagaatatcttacatcttttgtttttgttgagtttcttgactctagtgccctgcag

SEQ ID NO: 1269 - DNA, 200 bp, Euphorbia heterophylla
ctgcagggcactagagtcaagaaactcaacaaaaacaaaagatgtaagatattctcaaagcaaggagataaatatacgggtctcgaggaggcttgggatttttattcctttcctggattgctttaaaagtgccaccaatgatactgcctccattttgttccagcatccaaacttttccgaatgctgctttcatgctgagt

SEQ ID NO: 1270 - DNA, 200 bp, Euphorbia heterophylla
gtttcttgactctagtgccctgcaggcgtctaccaaaaccaaagggccaaacagtagggtcttttaggaagggactgactatgcttccagaggcaattgcatcaaggtaacatttccaccggaattaaaattttatgaactttagatggttgtaataattcttgacagtggctgaagtaattgactgattacctgcattg

SEQ ID NO: 1271 - DNA, 200 bp, Euphorbia heterophylla
caatgcaggtaatcagtcaattacttcagccactgtcaagaattattacaaccatctaaagttcataaaattttaattccggtggaaatgttaccttgatgcaattgcctctggaagcatagtcagtcccttcctaaaagaccctactgtttggccctttggttttggtagacgcctgcagggcactagagtcaagaaac

SEQ ID NO: 1272 - DNA, 200 bp, Euphorbia heterophylla
agtaattgactgattacctgcattggtgttgcagtttgggtagtaatatcaagttatcttggaagcttctgggtatctctaaattggacaatcgggagtacagtttaacatatgaaacacctgaaggatcagttactgtgcagagcaagagtgtcgtacttacaattccatcccatattgccagcaatatcctgaatcct

SEQ ID NO: 1273 - DNA, 200 bp, Euphorbia heterophylla
aggattcaggatattgctggcaatatgggatggaattgtaagtacgacactcttgctctgcacagtaactgatccttcaggtgtttcatatgttaaactgtactcccgattgtccaatttagagatacccagaagcttccaagataacttgatattactacccaaactgcaacaccaatgcaggtaatcagtcaattact

SEQ ID NO: 1274 - DNA, 77 bp, Euphorbia heterophylla; identical to SEQ ID NO: 48

SEQ ID NO: 1275 - DNA, 77 bp, Euphorbia heterophylla
tactctgaaaattcggttcggtttgtttattaaagttaaacatttcaattttcaattcagttttagtgttgaaaaaa

SEQ ID NO: 1276 - DNA, 200 bp, Kochia scoparia
atacactgctctacaatctcaacctcaactccaacctcaagttcaaacccaggaacacttggcgaaggaggattattggattgtgtgatcgtgggaggtggtattagtgggctctgcattgcacaagcactttctacaaagtactcttctctttctacaaatttcattgttaccgaggcgaaagatcgagttggtggcaa

SEQ ID NO: 1277 - DNA, 200 bp, Kochia scoparia
ttgccaccaactcgatctttcgcctcggtaacaatgaaatttgtagaaagagaagagtactttgtagaaagtgcttgtgcaatgcagagcccactaataccacctcccacgatcacacaatccaataatcctccttcgccaagtgttcctgggtttgaacttgaggttggagttgaggttgagattgtagagcagtgtat

SEQ ID NO: 1278 - DNA, 200 bp, Kochia scoparia
aggcgaaagatcgagttggtggcaacattaccaccaaggaggatgatggctatatctgggaagaaggacccaacagttttcagccgtctgatgcagttctcaccatggctgttgattgtgggttgaaagatgaattggtgtttggtgaccccaaagcacctcgatttgtgctgtggaatgggaaattaaggcgggtacct

SEQ ID NO: 1279 - DNA, 200 bp, Kochia scoparia
aggtacccgccttaatttcccattccacagcacaaatcgaggtgctttggggtcaccaaacaccaattcatctttcaacccacaatcaacagccatggtgagaactgcatcagacggctgaaaactgttgggtccttcttcccagatatagccatcatcctccttggtggtaatgttgccaccaactcgatctttcgcct

SEQ ID NO: 1280 - DNA, 200 bp, Kochia scoparia
gaatgggaaattaaggcgggtaccttctaagctcacagatctccctttctttgatcttatgagctttcctggcaagattagagctggccttggcgctcttggatttcgtccttctccaccaggtcgtgaagaatctgttgaggattttgttcgtcgaaatcttggcgatgaggtctttgaacgtttgattgaaccttttt

SEQ ID NO: 1281 - DNA, 200 bp, Kochia scoparia
aaaaaggttcaatcaaacgttcaaagacctcatcgccaagatttcgacgaacaaaatcctcaacagattcttcacgacctggtggagaaggacgaaatccaagagcgccaaggccagctctaatcttgccaggaaagctcataagatcaaagaaagggagatctgtgagcttagaaggtacccgccttaatttcccattc

SEQ ID NO: 1282 - DNA, 200 bp, Kochia scoparia
tttgaacgtttgattgaacctttttgttcaggtgtgtatgctggtgatcctgccaagttaagcatgaaagctgcttttggcagagtgtgggttttggagcagatgggtggtaatatcattggtggcgctctcaaaactatccaggaaaagaagaataagcctaagccgcctcgagatccgcgccttccgaagccaaaggg

SEQ ID NO: 1283 - DNA, 200 bp, Kochia scoparia
ccctttggcttcggaaggcgcggatctcgaggcggcttaggcttattcttcttttcctggatagttttgagagcgccaccaatgatattaccacccatctgctccaaaacccacactctgccaaaagcagctttcatgcttaacttggcaggatcaccagcatacacacctgaacaaaaaggttcaatcaaacgttcaaa

SEQ ID NO: 1284 - DNA, 200 bp, Kochia scoparia
atccgcgccttccgaagccaaagggtcagacagttggatcctttaggaaaggactcattatgttgccgaacgccatttctgctaggcttggaagtaaagtgaaactttcttggactctagctagtatttctaagacacacaatggggaatataatttgatttatgatacaccagatggaccggtttccgtaaggactaaa

SEQ ID NO: 1285 - DNA, 200 bp, Kochia scoparia
tttagtccttacggaaaccggtccatctggtgtatcataaatcaaattatattccccattgtgtgtcttagaaatactagctagagtccaagaaagtttcactttacttccaagcctagcagaaatggcgttcggcaacataatgagtcctttcctaaaggatccaactgtctgaccctttggcttcggaaggcgcggat

SEQ ID NO: 1286 - DNA, 200 bp, Kochia scoparia
tggaccggtttccgtaaggactaaaagtatcgtgatgactattccatcatatgttgcaagtagtctgcttcgtccattctcagatgctgctgcagattccctttcaaaatttcactatccacctgttgcagcagtgtcactgtcttatcctgaagaagcgattagacctgagtgcttgattgatggtaaacttcaaggat

SEQ ID NO: 1287 - DNA, 200 bp, Kochia scoparia
atccttgaagtttaccatcaatcaagcactcaggtctaatcgcttcttcaggataagacagtgacactgctgcaacaggtggatagtgaaattttgaaagggaatctgcagcagcatctgagaatggacgaagcagactacttgcaacatatgatggaatagtcatcacgatacttttagtccttacggaaaccggtcca

SEQ ID NO: 1288 - DNA, 200 bp, Kochia scoparia
ttgattgatggtaaacttcaaggattcgggcaactgcatccccgcagtcagggtgtggaaaccttgggatcaatttatagttcatctcttttccctggtcgagcaccacctggtaggaccatgatcttgagcttcattggaggtgctactaatcctggcatagtagacaagacgcaagatgaacttgctaagactgttga

SEQ ID NO: 1289 - DNA, 200 bp, Kochia scoparia
tcaacagtcttagcaagttcatcttgcgtcttgtctactatgccaggattagtagcacctccaatgaagctcaagatcatggtcctaccaggtggtgctcgaccagggaaaagagatgaactataaattgatcccaaggtttccacaccctgactgcggggatgcagttgcccgaatccttgaagtttaccatcaatcaa

SEQ ID NO: 1290 - DNA, 200 bp, Kochia scoparia
aagatgaacttgctaagactgttgacaaggacctgagaagaattcttataaatccaagtgcaaaagatcctcgtgttctaggcgtgaaagtatggcctcaagcaataccccaatttttgataggccactttgatctgcttgatgctgcaaaagctgctttgactgatgctgggtgtaaaggattgtttcttggaggaaac

SEQ ID NO: 1291 - DNA, 200 bp, Kochia scoparia
gtttcctccaagaaacaatcctttacacccagcatcagtcaaagcagcttttgcagcatcaagcagatcaaagtggcctatcaaaaattggggtattgcttgaggccatactttcacgcctagaacacgaggatcttttgcacttggatttataagaattcttctcaggtccttgtcaacagtcttagcaagttcatctt

SEQ ID NO: 1292 - DNA, 200 bp, Kochia scoparia; identical to SEQ ID NO: 1276

SEQ ID NO: 1293 - DNA, 200 bp, Kochia scoparia; identical to SEQ ID NO: 1277

SEQ ID NO: 1294 - DNA, 200 bp, Kochia scoparia; identical to SEQ ID NO: 1278

SEQ ID NO: 1295 - DNA, 200 bp, Kochia scoparia; identical to SEQ ID NO: 1279

SEQ ID NO: 1296 - DNA, 200 bp, Kochia scoparia; identical to SEQ ID NO: 1280

SEQ ID NO: 1297 - DNA, 200 bp, Kochia scoparia; identical to SEQ ID NO: 1281

SEQ ID NO: 1298 - DNA, 200 bp, Kochia scoparia; identical to SEQ ID NO: 1282

SEQ ID NO: 1299 - DNA, 200 bp, Kochia scoparia; identical to SEQ ID NO: 1283

SEQ ID NO: 1300 - DNA, 200 bp, Kochia scoparia; identical to SEQ ID NO: 1284

SEQ ID NO: 1301 - DNA, 200 bp, Kochia scoparia; identical to SEQ ID NO: 1285

SEQ ID NO: 1302 - DNA, 200 bp, Kochia scoparia
caggatgctgctgcagattccctttcaaaatttcactatccacctgttgcagcagtgtcactgtcttatcctgaagaagcgattagacctgagtgcttgattgatggtaaacttcaaggattcgggcaactgcatccccgcagtcagggtgtggaaaccttgggatcaatttatagttcatctcttttccctggtcgagc

SEQ ID NO: 1303 - DNA, 200 bp, Kochia scoparia
gctcgaccagggaaaagagatgaactataaattgatcccaaggtttccacaccctgactgcggggatgcagttgcccgaatccttgaagtttaccatcaatcaagcactcaggtctaatcgcttcttcaggataagacagtgacactgctgcaacaggtggatagtgaaattttgaaagggaatctgcagcagcatcctg

SEQ ID NO: 1304 - DNA, 200 bp, Kochia scoparia
gttcatctcttttccctggtcgagcaccacctggtaggaccatgatcttgagcttcattggaggtgctactaatcctggcatagtagacaagacgcaagatgaacttgctaagactgttgacaaggacctgagaagaattcttataaatccaagtgcaaaagatcctcgtgttctaggcgtgaaagtatggcctcaagca

SEQ ID NO: 1305 - DNA, 200 bp, Kochia scoparia
tgcttgaggccatactttcacgcctagaacacgaggatcttttgcacttggatttataagaattcttctcaggtccttgtcaacagtcttagcaagttcatcttgcgtcttgtctactatgccaggattagtagcacctccaatgaagctcaagatcatggtcctaccaggtggtgctcgaccagggaaaagagatgaac

SEQ ID NO: 1306 - DNA, 200 bp, Kochia scoparia
aggcgtgaaagtatggcctcaagcaataccccaatttttgataggccactttgatctgcttgatgctgcaaaagctgctttgactgatgctgggtgtaaaggattgtttcttggaggaaactatgtatcaggtgttgccttggggcggtgtatagagggtgcttatgaatctgcagccgaggtagttgatttcctctccc

SEQ ID NO: 1307 - DNA, 200 bp, Kochia scoparia
gggagaggaaatcaactacctcggctgcagattcataagcaccctctatacaccgccccaaggcaacacctgatacatagtttcctccaagaaacaatcctttacacccagcatcagtcaaagcagcttttgcagcatcaagcagatcaaagtggcctatcaaaaattggggtattgcttgaggccatactttcacgcct

SEQ ID NO: 1308 - DNA, 200 bp, Kochia scoparia
gtaacttgcctacccctctcagttataattactacattcaagaaggttaatgtgaaaagacctcttgagggctttggagttcttgtcccctctgttgagcagaaaaatgggttgaagactcttggtacactattttcctccatcatgtttcctgatcgtgctccctctgatgtgtatctctatacaacctttgttggtgg

SEQ ID NO: 1309 - DNA, 200 bp, Kochia scoparia
ccaccaacaaaggttgtatagagatacacatcagagggagcacgatcaggaaacatgatggaggaaaatagtgtaccaagagtcttcaacccatttttctgctcaacagaggggacaagaactccaaagccctcaagaggtcttttcacattaaccttcttgaatgtagtaattataactgagaggggtaggcaagttac

SEQ ID NO: 1310 - DNA, 200 bp, Kochia scoparia
atctctatacaacctttgttggtggaagcaggaatagtgaacttgcaaaagcttcaacggatgagctgaagcaaatagtttcttctgaccttgagaagctattgggcactgagggtgaacctacctctgtgaatcatttctattggagcaaggcattccctctttatgggcgcaactatgactcagtactcaaagcaatc

SEQ ID NO: 1311 - DNA, 200 bp, Kochia scoparia
gattgctttgagtactgagtcatagttgcgcccataaagagggaatgccttgctccaatagaaatgattcacagaggtaggttcaccctcagtgcccaatagcttctcaaggtcagaagaaactatttgcttcagctcatccgttgaagcttttgcaagttcactattcctgcttccaccaacaaaggttgtatagagat

SEQ ID NO: 1312 - DNA, 150 bp, Lolium multiflorum; identical to SEQ ID NO: 65

SEQ ID NO: 1313 - DNA, 150 bp, Lolium multiflorum
tttcagaccatgtttttgctgttccttatagggtaccaacaccccaaatccttccaggggtcttttgacatcttccttcttaaaagctgttaccatgagggataacggcagataatccacctgcataataaataccaataaggcaggatt

SEQ ID NO: 1314 - DNA, 108 bp, Lolium multiflorum; identical to SEQ ID NO: 68

SEQ ID NO: 1315 - DNA, 108 bp, Lolium multiflorum
accgccaaggagcgtgtccgcctcgaagacgacgggccggcagccgcgctccagcaggtgcttgcacgccgccaggccgctcacgccggcgccgatgatggccaccct

SEQ ID NO: 1316 - DNA, 144 bp, Lolium multiflorum; identical to SEQ ID NO: 66

SEQ ID NO: 1317 - DNA, 144 bp, Lolium multiflorum
cttttctaaattccataacgctggaaatgcatgacggatagataatgactcaggatctcctgcacttgttccagctacaaatggatcaataagatagtcgacaacttcctttccaaaatggcgttcaaagaagctcccaacact

SEQ ID NO: 1318 - DNA, 114 bp, Lolium multiflorum; identical to SEQ ID NO: 67

SEQ ID NO: 1319 - DNA, 114 bp, Lolium multiflorum
cgttggagctccagcgagatccctattgtggcttcccccaacgaatgttgtaaataagtgttggtcattaggagctcgatctgggaacatcatagaggagaagagggttcctat

SEQ ID NO: 1320 - DNA, 200 bp, Lolium multiflorum
ctcgacgcgaacgcgggatctctttcgcgtcaggcgtgaaatagggccggatttccatatacaactactaaccgagaaccccgcccactggaatgcgattcccagcccatcgacctatccaattccaattccagtgggccatgaaaaccgcaaaccaaccaaccaatacagccgcagccgcatcccgtcatccactccgc

SEQ ID NO: 1321 - DNA, 200 bp, Lolium multiflorum
gcggagtggatgacgggatgcggctgcggctgtattggttggttggtttgcggttttcatggcccactggaattggaattggataggtcgatgggctgggaatcgcattccagtgggcggggttctcggttagtagttgtatatggaaatccggccctatttcacgcctgacgcgaaagagatcccgcgttcgcgtcgag

SEQ ID NO: 1322 - DNA, 200 bp, Lolium multiflorum
agccgcatcccgtcatccactccgcactgccatctcccccgcccgagcgacggaaatggtcggcgcaaccatggccaccgctaccgtcacggcggcgctaccgctccgcctccgggtccccgcgcgcccccgacgcggacagacgcgctgcgcggtcgcgagcgatgccaccgaggcgccggccgtgcccagcgcacggc

SEQ ID NO: 1323 - DNA, 200 bp, Lolium multiflorum
gccgtgcgctgggcacggccggcgcctcggtggcatcgctcgcgaccgcgcagcgcgtctgtccgcgtcgggggcgcgcggggacccggaggcggagcggtagcgccgccgtgacggtagcggtggccatggttgcgccgaccatttccgtcgctcgggcgggggagatggcagtgcggagtggatgacgggatgcggct

SEQ ID NO: 1324 - DNA, 200 bp, Lolium multiflorum
gcgccggccgtgcccagcgcacggctgtccgcggattgcgtcatcgtgggcggcggcatcagcggcctctgcaccgcacaggcgctggccaccaagtacggcgtcaccgacttgctcgtcacggaggcccgcgctcgcgcaggcggcaacatcaccaccgtcgagcgccccgacgaggggtacctctgggaggagggccc

SEQ ID NO: 1325 - DNA, 200 bp, Lolium multiflorum
gggccctcctcccagaggtacccctcgtcggggcgctcgacggtggtgatgttgccgcctgcgcgagcgcgggcctccgtgacgagcaagtcggtgacgccgtacttggtggccagcgcctgtgcggtgcagaggccgctgatgccgccgcccacgatgacgcaatccgcggacagccgtgcgctgggcacggccggcgc

SEQ ID NO: 1326 - DNA, 200 bp, Lolium multiflorum
aggggtacctctgggaggagggccccaacagcttccagccctccgaccccgtcctcaccatggccgtacgcaccatgctcgctttctccttcttttccggattcttcgggacgtaggcgtacagaatacagatacgatcgctgaatggattggttgcgcaggtagacagcgggctcaaggatgacttggtgttcggggac

SEQ ID NO: 1327 - DNA, 200 bp, Lolium multiflorum
gtccccgaacaccaagtcatccttgagcccgctgtctacctgcgcaaccaatccattcagcgatcgtatctgtattctgtacgcctacgtcccgaagaatccggaaaagaaggagaaagcgagcatggtgcgtacggccatggtgaggacggggtcggagggctggaagctgttggggccctcctcccagaggtacccct

SEQ ID NO: 1328 - DNA, 200 bp, Lolium multiflorum
caaggatgacttggtgttcggggaccccaatgcgccgcgcttcgtgctgtggcaggggaagctgaggccggtgccgtccaagcctggcgacctgcctttcttcgacctcatgagtattcctgggaagctcagggccggccttggcgcgctcggcattcgtccgcctcctccagtttgtgctctgcccgtgctctctattc

SEQ ID NO: 1329 - DNA, 200 bp, Lolium multiflorum
gaatagagagcacgggcagagcacaaactggaggaggcggacgaatgccgagcgcgccaaggccggccctgagcttcccaggaatactcatgaggtcgaagaaaggcaggtcgccaggcttggacggcaccggcctcagcttcccctgccacagcacgaagcgcggcgcattggggtccccgaacaccaagtcatccttg

SEQ ID NO: 1330 - DNA, 200 bp, Lolium multiflorum
tgtgctctgcccgtgctctctattctttagtgaattttgattgtcaaagatggggctgagcgttcccggcgaaggtttcaggggcgtgaggagtcggtggaggagtttgtgcgccgcaacctcggcgcggaggtctttgagcgcctcatcgagcctttctgctcaggtaatgtgcagtagtatatgtctgttctgttctg

SEQ ID NO: 1331 - DNA, 200 bp, Lolium multiflorum
cagaacagaacagacatatactactgcacattacctgagcagaaaggctcgatgaggcgctcaaagacctccgcgccgaggttgcggcgcacaaactcctccaccgactcctcacgcccctgaaaccttcgccgggaacgctcagccccatctttgacaatcaaaattcactaaagaatagagagcacgggcagagcaca

SEQ ID NO: 1332 - DNA, 200 bp, Lolium multiflorum
agtagtatatgtctgttctgttctgctctgcttcttgcattgatcccgataataagaatataacatttcgatatcaacgttaggtgtgtatgcgggtgacccttcaaagctcagtatgcgggctgcatttgggaaggtatggagactggaggagaatggaggcagtattattggtggaaccatcaaggcaattcaggata

SEQ ID NO: 1333 - DNA, 200 bp, Lolium multiflorum
tatcctgaattgccttgatggttccaccaataatactgcctccattctcctccagtctccataccttcccaaatgcagcccgcatactgagctttgaagggtcacccgcatacacacctaacgttgatatcgaaatgttatattcttattatcgggatcaatgcaagaagcagagcagaacagaacagacatatactact

SEQ ID NO: 1334 - DNA, 200 bp, Lolium multiflorum
ggaaccatcaaggcaattcaggatagaggcaagaaccccaaaccaccgagggatccgtaagtggagactctacttttctatttagtcagttaactcactgttccattagactcgtattaatctgtttcaccacttttagccgacttccgacaccaaaggggcagacggtggcatctttcaggaagggtctagccatgctc

SEQ ID NO: 1335 - DNA, 200 bp, Lolium multiflorum
gagcatggctagacccttcctgaaagatgccaccgtctgcccctttggtgtcggaagtcggctaaaagtggtgaaacagattaatacgagtctaatggaacagtgagttaactgactaaatagaaaagtagagtctccacttacggatccctcggtggtttggggttcttgcctctatcctgaattgccttgatggttcc

SEQ ID NO: 1336 - DNA, 200 bp, Lolium multiflorum
tttcaggaagggtctagccatgctcccaaatgctatcgcttctaggtttgttttcatcacttgtgcacatacctaagttatgctatcagtatacgtggtgctgtatattgttcagatagaggggacagatctgttggtagacctactgtttgctgaactcaataccatatgaatatcattgcatcagcacccaaagtacc

SEQ ID NO: 1337 - DNA, 200 bp, Lolium multiflorum
ggtactttgggtgctgatgcaatgatattcatatggtattgagttcagcaaacagtaggtctaccaacagatctgtcccctctatctgaacaatatacagcaccacgtatactgatagcataacttaggtatgtgcacaagtgatgaaaacaaacctagaagcgatagcatttgggagcatggctagacccttcctgaaa

SEQ ID NO: 1338 - DNA, 200 bp, Lolium multiflorum
tcattgcatcagcacccaaagtacctgtggctcgattattatatcagccattctcgcattgttgatactaatgcatctgtgttaatctttttcatcttgcttttttggttgggacctgtactatataggaaattccacgagggatgagttatagagcatgtgtgtgtatgtccatgccccttgtactcggagatgatcat

SEQ ID NO: 1339 - DNA, 200 bp, Lolium multiflorum
atgatcatctccgagtacaaggggcatggacatacacacacatgctctataactcatccctcgtggaatttcctatatagtacaggtcccaaccaaaaaagcaagatgaaaaagattaacacagatgcattagtatcaacaatgcgagaatggctgatataataatcgagccacaggtactttgggtgctgatgcaatga

SEQ ID NO: 1340 - DNA, 200 bp, Lolium multiflorum
gccccttgtactcggagatgatcatgaattatagtaataatttcatgcttggtcttaagacgtaaccctgtcatgttttgcattccttcatttccaggttgggtagtaaagtcaaactctcgtggaagcttacgggcattacaaagtcggacaaccagggatatgtgttagcgtatgaaacaccggaaggagttgtttca

SEQ ID NO: 1341 - DNA, 200 bp, Lolium multiflorum
tgaaacaactccttccggtgtttcatacgctaacacatatccctggttgtccgactttgtaatgcccgtaagcttccacgagagtttgactttactacccaacctggaaatgaaggaatgcaaaacatgacagggttacgtcttaagaccaagcatgaaattattactataattcatgatcatctccgagtacaaggggc

SEQ ID NO: 1342 - DNA, 200 bp, Lolium multiflorum
tgaaacaccggaaggagttgtttcagtgcaggctaaaagtgttatcatgaccattccgtcatatattgctagtgaaatcttgcgcccactttcggtaagttcatgtttgcaaaattaattggtgtactactaatgttagtgttaggttcctgtagttctccatactcctgtgcagtggcggacccaggattttggcaaag

SEQ ID NO: 1343 - DNA, 200 bp, Lolium multiflorum
ctttgccaaaatcctgggtccgccactgcacaggagtatggagaactacaggaacctaacactaacattagtagtacaccaattaattttgcaaacatgaacttaccgaaagtgggcgcaagatttcactagcaatatatgacggaatggtcatgataacacttttagcctgcactgaaacaactccttccggtgtttca

SEQ ID NO: 1344 - DNA, 200 bp, Lolium multiflorum
tggcggacccaggattttggcaaagggtatgccacacaaaaaaattggcctgccttgataacgattttttcttagaatatgaagtagaagtgatgattatgaaatatgattgaaaaaatcaaataaaagtgttcttgcattataatcaaaatattaaattgcttaacacatgcacggtttgcgaggtgtcctatttttta

SEQ ID NO: 1345 - DNA, 200 bp, Lolium multiflorum
taaaaaataggacacctcgcaaaccgtgcatgtgttaagcaatttaatattttgattataatgcaagaacacttttatttgattttttcaatcatatttcataatcatcacttctacttcatattctaagaaaaaatcgttatcaaggcaggccaatttttttgtgtggcataccctttgccaaaatcctgggtccgcca

SEQ ID NO: 1346 - DNA, 200 bp, Lolium multiflorum
ggtttgcgaggtgtcctattttttaaactaatttctcaccgtaccatctgaccctaaatttctgaagtatttgaccacggaataatcgtttcagcaacactacaagataacgttagatcgtactaaataaacaaagaaatatgctgaagaaagctacaacggagcatataaaaattagtcacaatagctaaatggtttct

SEQ ID NO: 1347 - DNA, 200 bp, Lolium multiflorum
agaaaccatttagctattgtgactaatttttatatgctccgttgtagctttcttcagcatatttctttgtttatttagtacgatctaacgttatcttgtagtgttgctgaaacgattattccgtggtcaaatacttcagaaatttagggtcagatggtacggtgagaaattagtttaaaaaataggacacctcgcaaacc

SEQ ID NO: 1348 - DNA, 200 bp, Lolium multiflorum
tagtcacaatagctaaatggtttcttaattaatcaccatagctaatcatccattacgaaagtacctggacgcatgcatggtgcatggccatgtctctaggctagtttagcaattaaccggatggtcaagtgagtaccaaaaactaataaagcatgtgtccctgtacgatgcatgctcgcaggctacatgcaccggcttga

SEQ ID NO: 1349 - DNA, 200 bp, Lolium multiflorum
tcaagccggtgcatgtagcctgcgagcatgcatcgtacagggacacatgctttattagtttttggtactcacttgaccatccggttaattgctaaactagcctagagacatggccatgcaccatgcatgcgtccaggtactttcgtaatggatgattagctatggtgattaattaagaaaccatttagctattgtgacta

SEQ ID NO: 1350 - DNA, 200 bp, Lolium multiflorum
tcgcaggctacatgcaccggcttgattaaaatggccagctgattacaggcggttcatatggctgggccgctaggtatgccatggcatatgcggcataccctgtaggtccgcactgctcctgtggtaaccatgaaatagcacgctagtacactattccttaatagagttgctaatcaataattgaccgcattacgatactg

SEQ ID NO: 1351 - DNA, 200 bp, Lolium multiflorum
cagtatcgtaatgcggtcaattattgattagcaactctattaaggaatagtgtactagcgtgctatttcatggttaccacaggagcagtgcggacctacagggtatgccgcatatgccatggcatacctagcggcccagccatatgaaccgcctgtaatcagctggccattttaatcaagccggtgcatgtagcctgcga

SEQ ID NO: 1352 - DNA, 200 bp, Lolium multiflorum
aataattgaccgcattacgatactggttgcctgtaatcttagtccaaacacatgattgagcatttttgttgagagattaattgattaatgtggttaaactgttcactgatgcataggttggactatttcttcaccaatcaactctatgtttcaaataattgaaatatacatcaatagattcagaaaactgtatcttgttt

SEQ ID NO: 1353 - DNA, 200 bp, Lolium multiflorum
aaacaagatacagttttctgaatctattgatgtatatttcaattatttgaaacatagagttgattggtgaagaaatagtccaacctatgcatcagtgaacagtttaaccacattaatcaattaatctctcaacaaaaatgctcaatcatgtgtttggactaagattacaggcaaccagtatcgtaatgcggtcaattatt

SEQ ID NO: 1354 - DNA, 200 bp, Lolium multiflorum
gagcgcctcatcgagccttctgctcaggtgtgtatgcgggtgacccttcaaagctcagtatgagggctgcgtttgggaaggtatggagactggaggagaatggaggcagtattattggtggaaccatcaaggcaattcaggatagaggcaagaaccccaaaccgccgagggatccccgacttccgacaccaaaggggcag

SEQ ID NO: 1355 - DNA, 200 bp, Lolium multiflorum
ctgcccctttggtgtcggaagtcggggatccctcggcggtttggggttcttgcctctatcctgaattgccttgatggttccaccaataatactgcctccattctcctccagtctccataccttcccaaacgcagccctcatactgagctttgaagggtcacccgcatacacacctgagcagaaggctcgatgaggcgctc

SEQ ID NO: 1356 - DNA, 200 bp, Lolium multiflorum
ccgacttccgacaccaaaggggcagacggtggcatctttcaggaagggtctagccatgctcccaaatgctatcgcttctaggttgggtagtaaagtcaaactctcgtggaagcttacgggcattacaaagtcggacaaccagggatatgtgttagcgtatgaaacaccggaaggagttgtttcagtgcaggctaaaagtg

SEQ ID NO: 1357 - DNA, 200 bp, Lolium multiflorum
cacttttagcctgcactgaaacaactccttccggtgtttcatacgctaacacatatccctggttgtccgactttgtaatgcccgtaagcttccacgagagtttgactttactacccaacctagaagcgatagcatttgggagcatggctagacccttcctgaaagatgccaccgtctgcccctttggtgtcggaagtcgg

SEQ ID NO: 1358 - DNA, 200 bp, Lolium multiflorum
gttgtttcagtgcaggctaaaagtgttatcatgaccattccgtcatatattgctagtgaaatcttgcgcccactttcgagtgatgcagcagatggtctctcaaaattttattatccaccggttgctgctgtaactgtttcatatccaacagaagctattagaaagaatgcttaattgatggggagctccagggtttcggc

SEQ ID NO: 1359 - DNA, 200 bp, Lolium multiflorum
gccgaaaccctggagctccccatcaattaagcattctttctaatagcttctgttggatatgaaacagttacagcagcaaccggtggataataaaattttgagagaccatctgctgcatcactcgaaagtgggcgcaagatttcactagcaatatatgacggaatggtcatgataacacttttagcctgcactgaaacaac

SEQ ID NO: 1360 - DNA, 200 bp, Lolium multiflorum
tgatggggagctccagggtttcggccagttgcatccacgtagccaaggagttgagactttagggacaatatatagctcttctctctttccgaatcgtgctcctgctggaagagtgttacttctgaactatatcgggggtgctacaaatacagggatcgtctccaagactgagagtgacttggtggaagcagttgatcgtg

SEQ ID NO: 1361 - DNA, 200 bp, Lolium multiflorum
cacgatcaactgcttccaccaagtcactctcagtcttggagacgatccctgtatttgtagcacccccgatatagttcagaagtaacactcttccagcaggagcacgattcggaaagagagaagagctatatattgtccctaaagtctcaactccttggctacgtggatgcaactggccgaaaccctggagctccccatca

SEQ ID NO: 1362 - DNA, 200 bp, Lolium multiflorum
gacttggtggaagcagttgatcgtgacctcagaaaaatgttgataaatcctacagcaccagaccctttagccttaggcgtccgagtgtggccacaagccattccacagtttttgattgggcaccttgatcgccttgatgcggcaaaatctgccttggccagaggcggctgcagtgggttgtttctaggaggaaactatgt

SEQ ID NO: 1363 - DNA, 200 bp, Lolium multiflorum
acatagtttcctcctagaaacaacccactgcagccgcctctggccaaggcagattttgccgcatcaaggcgatcaaggtgcccaatcaaaaactgtggaatggcttgtggccacactcggacgcctaaggctaaagggtctggtgctgtaggatttatcaacatttttctgaggtcacgatcaactgcttccaccaagtc

SEQ ID NO: 1364 - DNA, 200 bp, Lolium multiflorum
ggttgtttctaggaggaaactatgtagcaggagttgccttgggccgatgcatcgagggtgcgtacgagagtgcctcagaagtatctgacttcttgaccaagtatgcctacaagtgatgaaagaagtgtaattcatcatcttgctgcatatttgaggtgcggccagaattagtaataattcggaaaatcttgtaatcttct

SEQ ID NO: 1365 - DNA, 200 bp, Lolium multiflorum
agaagattacaagattttccgaattattactaattctggccgcacctcaaatatgcagcaagatgatgaattacacttctttcatcacttgtaggcatacttggtcaagaagtcagatacttctgaggcactctcgtacgcaccctcgatgcatcggcccaaggcaactcctgctacatagtttcctcctagaaacaacc

SEQ ID NO: 1366 - DNA, 200 bp, Lolium multiflorum
ggttttggtattattctactaataattcgtggcatttttatgtagggacaatatatagctcttctctctttccaaatcgtgctcctgctggaagagtgttacttctgaactatatcggtggtgctacaaatacagggatcgtctccaaggttctctcgacctgctggatactcatgtcattttcttattgcgtgatacca

SEQ ID NO: 1367 - DNA, 200 bp, Lolium multiflorum
tggtatcacgcaataagaaaatgacatgagtatccagcaggtcgagagaaccttggagacgatccctgtatttgtagcaccaccgatatagttcagaagtaacactcttccagcaggagcacgatttggaaagagagaagagctatatattgtccctacataaaaatgccacgaattattagtagaataataccaaaacc

SEQ ID NO: 1368 - DNA, 200 bp, Lolium multiflorum
gtcattttcttattgcgtgataccaggttacagtattcagttagtgttggtcacctattcatttatgattaatataaataactggactgcatttttcacccccagctgcaattgtgaatacaaatagattaaatggtctgcttagatgctacattcaatctcaatagtattgttagattttttttttggctggccatatt

SEQ ID NO: 1369 - DNA, 200 bp, Lolium multiflorum
aatatggccagccaaaaaaaaaatctaacaatactattgagattgaatgtagcatctaagcagaccatttaatctatttgtattcacaattgcagctgggggtgaaaaatgcagtccagttatttatattaatcataaatgaataggtgaccaacactaactgaatactgtaacctggtatcacgcaataagaaaatgac

SEQ ID NO: 1370 - DNA, 200 bp, Lolium multiflorum
gattttttttttggctggccatatttatactgatcccattttgtttgcagactgagagtgacttggtggaagcagttgatcgtgacctcagaaaaatgttgataaatcctacagcaccagaccctttagccttaggtgtccgagtgtggccacaagccattccacagtttttgattgggcaccttgatcgccttgatgcg

SEQ ID NO: 1371 - DNA, 200 bp, Lolium multiflorum
cgcatcaaggcgatcaaggtgcccaatcaaaaactgtggaatggcttgtggccacactcggacacctaaggctaaagggtctggtgctgtaggatttatcaacatttttctgaggtcacgatcaactgcttccaccaagtcactctcagtctgcaaacaaaatgggatcagtataaatatggccagccaaaaaaaaaatc

SEQ ID NO: 1372 - DNA, 200 bp, Lolium multiflorum
tgggcaccttgatcgccttgatgcggcaaaatctgccttggccagaggcggctgcagtgggttgttcctaggaggaaactatgtagcaggagttgccttgggccgatgcatcgagggtgcgtacgagagtgcctcagaagtatctgacttcttgaccaagtatgcctacaagtgatgaaagaagtgtaattcatcatctt

SEQ ID NO: 1373 - DNA, 200 bp, Lolium multiflorum
aagatgatgaattacacttctttcatcacttgtaggcatacttggtcaagaagtcagatacttctgaggcactctcgtacgcaccctcgatgcatcggcccaaggcaactcctgctacatagtttcctcctaggaacaacccactgcagccgcctctggccaaggcagattttgccgcatcaaggcgatcaaggtgccca

SEQ ID NO: 1374 - DNA, 200 bp, Lolium multiflorum
tcaggggcgtgaggagtcggtggaggaatttgtgcgccgcaacctgggtgcggaggtctttgagcgcctcatcgagcctttctgctcaggtagtgtgcagtagtatctgtctgttctgttctgctctgcttcctgcattgattccgataataagaatataacatttcgatatcaacgttaggtgtgtatgcgggtgaccc

SEQ ID NO: 1375 - DNA, 200 bp, Lolium multiflorum
gggtcacccgcatacacacctaacgttgatatcgaaatgttatattcttattatcggaatcaatgcaggaagcagagcagaacagaacagacagatactactgcacactacctgagcagaaaggctcgatgaggcgctcaaagacctccgcacccaggttgcggcgcacaaattcctccaccgactcctcacgcccctga

SEQ ID NO: 1376 - DNA, 200 bp, Lolium multiflorum
cgttaggtgtgtatgcgggtgacccttcaaagctcagtatgcgggctgcgtttgggaaggtatggagactggaggagaatggaggcagtattattggtggaaccatcaaggcaattcaggatagaggcaagaaccccaaaccgccgagggatccgtaagtggagactgcaattttctatttagtcagttaactgttccat

SEQ ID NO: 1377 - DNA, 200 bp, Lolium multiflorum
atggaacagttaactgactaaatagaaaattgcagtctccacttacggatccctcggcggtttggggttcttgcctctatcctgaattgccttgatggttccaccaataatactgcctccattctcctccagtctccataccttcccaaacgcagcccgcatactgagctttgaagggtcacccgcatacacacctaacg

SEQ ID NO: 1378 - DNA, 200 bp, Lolium multiflorum
ttgaaacaacttgtgacctctgaccttagaaagctcttgggtgtagaggggcagccaacttttgtgagacatatacattggaaaaatgcttttcctctgtatggccatgattatgatttggcattggaagctataggaaagatggagaatgatcttccagggttcttctatgcaggaaataacaaggatggcttggctgt

SEQ ID NO: 1379 - DNA, 200 bp, Lolium multiflorum
acagccaagccatccttgttatttcctgcatagaagaaccctggaagatcattctccatctttcctatagcttccaatgccaaatcataatcatggccatacagaggaaaagcatttttccaatgtatatgtctcacaaaagttggctgcccctctacacccaagagctttctaaggtcagaggtcacaagttgtttcaa

SEQ ID NO: 1380 - DNA, 200 bp, Lolium multiflorum
ttgatatttattatgcaggtggattatctgccgttatccctcatggtaacagcttttaagaaggaagatgtcaaaagacccctggaaggatttggggtgttggtaccctataaggaacagcaaaaacatggtctgaaaacccttggaaccctcttctcctctatgatgttcccagatcgagctcctaatgaccaacactt

SEQ ID NO: 1381 - DNA, 200 bp, Lolium multiflorum
aagtgttggtcattaggagctcgatctgggaacatcatagaggagaagagggttccaagggttttcagaccatgtttttgctgttccttatagggtaccaacaccccaaatccttccaggggtcttttgacatcttccttcttaaaagctgttaccatgagggataacggcagataatccacctgcataataaatatcaa

SEQ ID NO: 1382 - DNA, 21 bp, Unknown
  Found in multiple species
tttgtagcacctccaatgtag

SEQ ID NO: 1383 - DNA, 21 bp, Unknown
  Found in multiple species
tggctatatctgggaagaggg

SEQ ID NO: 1384 - DNA, 21 bp, Unknown
  Found in multiple species
tcttcccagatatagccatcg

SEQ ID NO: 1385 - DNA, 21 bp, Unknown
  Found in multiple species
tacattggaggtgctacaaat

SEQ ID NO: 1386 - DNA, 21 bp, Unknown
  Found in multiple species
gatggctatatctgggaagag

SEQ ID NO: 1387 - DNA, 21 bp, Unknown
  Found in multiple species
cttcccagatatagccatcgg

SEQ ID NO: 1388 - DNA, 21 bp, Unknown
  Found in multiple species
ctcttcccagatatagccatc

SEQ ID NO: 1389 - DNA, 21 bp, Unknown
  Found in multiple species
ctacattggaggtgctacaaa

SEQ ID NO: 1390 - DNA, 21 bp, Unknown
  Found in multiple species
cgatggctatatctgggaaga

SEQ ID NO: 1391 - DNA, 21 bp, Unknown
  Found in multiple species
cctcttcccagatatagccat

SEQ ID NO: 1392 - DNA, 21 bp, Unknown
  Found in multiple species
ccgatggctatatctgggaag

SEQ ID NO: 1393 - DNA, 21 bp, Unknown
  Found in multiple species
ccctcttcccagatatagcca

SEQ ID NO: 1394 - DNA, 21 bp, Unknown
  Found in multiple species
atttgtagcacctccaatgta

SEQ ID NO: 1395 - DNA, 21 bp, Unknown
  Found in multiple species
atggctatatctgggaagagg

SEQ ID NO: 1396 - DNA, 21 bp, Unknown
  Found in multiple species
ttttttgatctcatgagcttt

SEQ ID NO: 1397 - DNA, 21 bp, Unknown
  Found in multiple species
tttttgatctcatgagctttc

SEQ ID NO: 1398 - DNA, 21 bp, Unknown
  Found in multiple species
ttttgctctaaggtccagacc

SEQ ID NO: 1399 - DNA, 21 bp, Unknown
  Found in multiple species
ttttgatctcatgagctttcc

SEQ ID NO: 1400 - DNA, 21 bp, Unknown
  Found in multiple species
tttggtcctaacagaaaccgg

SEQ ID NO: 1401 - DNA, 21 bp, Unknown
  Found in multiple species
tttggccatactctcactccc

SEQ ID NO: 1402 - DNA, 21 bp, Unknown
  Found in multiple species
tttggatttatcagaattttt

SEQ ID NO: 1403 - DNA, 21 bp, Unknown
  Found in multiple species
tttggaaaggtctggacctta

SEQ ID NO: 1404 - DNA, 21 bp, Unknown
  Found in multiple species
tttgctctaaggtccagacct

SEQ ID NO: 1405 - DNA, 21 bp, Unknown
  Found in multiple species
tttgatctcatgagctttcct

SEQ ID NO: 1406 - DNA, 21 bp, Unknown
  Found in multiple species
tttgagtgtaccggcgatgat

SEQ ID NO: 1407 - DNA, 21 bp, Unknown
  Found in multiple species
tttgactttactgccaagcct

SEQ ID NO: 1408 - DNA, 21 bp, Unknown
  Found in multiple species
tttctgttaggaccaaagcgg

SEQ ID NO: 1409 - DNA, 21 bp, Unknown
  Found in multiple species
tttctaatattgataagtcgc

SEQ ID NO: 1410 - DNA, 21 bp, Unknown
  Found in multiple species
tttcgcatttggatttatcag

SEQ ID NO: 1411 - DNA, 21 bp, Unknown
  Found in multiple species
tttcctggtaagattagggct

SEQ ID NO: 1412 - DNA, 21 bp, Unknown
  Found in multiple species
tttcctaaaggatccaacagt

SEQ ID NO: 1413 - DNA, 21 bp, Unknown
  Found in multiple species
tttccaaatgcagctttcata

SEQ ID NO: 1414 - DNA, 21 bp, Unknown
  Found in multiple species
tttcaatccactgtcaaccgc

SEQ ID NO: 1415 - DNA, 21 bp, Unknown
  Found in multiple species
tttatcagaatttttctgaga

SEQ ID NO: 1416 - DNA, 21 bp, Unknown
  Found in multiple species
tttaggaaggcgggggtctcg

SEQ ID NO: 1417 - DNA, 21 bp, Unknown
  Found in multiple species
tttactgccaagcctagcagc

SEQ ID NO: 1418 - DNA, 21 bp, Unknown
  Found in multiple species
ttgtagcacctccaatgtagc

SEQ ID NO: 1419 - DNA, 21 bp, Unknown
  Found in multiple species
ttggtcctaacagaaaccggt

SEQ ID NO: 1420 - DNA, 21 bp, Unknown
  Found in multiple species
ttggccatactctcactccca

SEQ ID NO: 1421 - DNA, 21 bp, Unknown
  Found in multiple species
ttggcagtaaagtcaaactat

SEQ ID NO: 1422 - DNA, 21 bp, Unknown
  Found in multiple species
ttggatttatcagaatttttc

SEQ ID NO: 1423 - DNA, 21 bp, Unknown
  Found in multiple species
ttggaaaggtctggaccttag

SEQ ID NO: 1424 - DNA, 21 bp, Unknown
  Found in multiple species
ttggaaactattaggaccctc

SEQ ID NO: 1425 - DNA, 21 bp, Unknown
  Found in multiple species
ttgctgctaggcttggcagta

SEQ ID NO: 1426 - DNA, 21 bp, Unknown
  Found in multiple species
ttgctctaaggtccagacctt

SEQ ID NO: 1427 - DNA, 21 bp, Unknown
  Found in multiple species
ttgcctttggccatactctca

SEQ ID NO: 1428 - DNA, 21 bp, Unknown
  Found in multiple species
ttgcaagtagcctgcttcgtc

SEQ ID NO: 1429 - DNA, 21 bp, Unknown
  Found in multiple species
ttgatcttgagctacattgga

SEQ ID NO: 1430 - DNA, 21 bp, Unknown
  Found in multiple species
ttgatctcatgagctttcctg

SEQ ID NO: 1431 - DNA, 21 bp, Unknown
  Found in multiple species
ttgataagtcgctcaatggtg

SEQ ID NO: 1432 - DNA, 21 bp, Unknown
  Found in multiple species
ttgagtgtaccggcgatgata

SEQ ID NO: 1433 - DNA, 21 bp, Unknown
  Found in multiple species
ttgagtatgaaagctgcattt

SEQ ID NO: 1434 - DNA, 21 bp, Unknown
  Found in multiple species
ttgagctacattggaggtgct

SEQ ID NO: 1435 - DNA, 21 bp, Unknown
  Found in multiple species
ttgagcgacttatcaatatta

SEQ ID NO: 1436 - DNA, 21 bp, Unknown
  Found in multiple species
ttgactttactgccaagccta

SEQ ID NO: 1437 - DNA, 21 bp, Unknown
  Found in multiple species
ttgaagaatttgtgcgccgta

SEQ ID NO: 1438 - DNA, 21 bp, Unknown
  Found in multiple species
ttctgttaggaccaaagcggt

SEQ ID NO: 1439 - DNA, 21 bp, Unknown
  Found in multiple species
ttctgggagtgagagtatggc

SEQ ID NO: 1440 - DNA, 21 bp, Unknown
  Found in multiple species
ttctgataaatccaaatgcga

SEQ ID NO: 1441 - DNA, 21 bp, Unknown
  Found in multiple species
ttctaatattgataagtcgct

SEQ ID NO: 1442 - DNA, 21 bp, Unknown
  Found in multiple species
ttcgcatttggatttatcaga

SEQ ID NO: 1443 - DNA, 21 bp, Unknown
  Found in multiple species
ttcctggtaagattagggctg

SEQ ID NO: 1444 - DNA, 21 bp, Unknown
  Found in multiple species
ttcctaaaggatccaacagtc

SEQ ID NO: 1445 - DNA, 21 bp, Unknown
  Found in multiple species
ttcctaaacctaagggccaga

SEQ ID NO: 1446 - DNA, 21 bp, Unknown
  Found in multiple species
ttcccttttttgatctcatga

SEQ ID NO: 1447 - DNA, 21 bp, Unknown
  Found in multiple species
ttcccagatatagccatcgga

SEQ ID NO: 1448 - DNA, 21 bp, Unknown
  Found in multiple species
ttccaaatgcagctttcatac

SEQ ID NO: 1449 - DNA, 21 bp, Unknown
  Found in multiple species
ttcatcttcactcttttgtaa

SEQ ID NO: 1450 - DNA, 21 bp, Unknown
  Found in multiple species
ttcatacattgcaagtagcct

SEQ ID NO: 1451 - DNA, 21 bp, Unknown
  Found in multiple species
ttcaggaaaggaagaataatc

SEQ ID NO: 1452 - DNA, 21 bp, Unknown
  Found in multiple species
ttcaccattgagcgacttatc

SEQ ID NO: 1453 - DNA, 21 bp, Unknown
  Found in multiple species
ttcaatccactgtcaaccgcc

SEQ ID NO: 1454 - DNA, 21 bp, Unknown
  Found in multiple species
ttattcttcctttcctgaata

SEQ ID NO: 1455 - DNA, 21 bp, Unknown
  Found in multiple species
ttatgttacctaccgccattg

SEQ ID NO: 1456 - DNA, 21 bp, Unknown
  Found in multiple species
ttatcagaatttttctgagat

SEQ ID NO: 1457 - DNA, 21 bp, Unknown
  Found in multiple species
ttatcaatattagaaagtgtc

SEQ ID NO: 1458 - DNA, 21 bp, Unknown
  Found in multiple species
ttaggtttaggaaggcggggg

SEQ ID NO: 1459 - DNA, 21 bp, Unknown
  Found in multiple species
ttaggaccctcttcccagata

SEQ ID NO: 1460 - DNA, 21 bp, Unknown
  Found in multiple species
ttaggaccaaagcggttgtca

SEQ ID NO: 1461 - DNA, 21 bp, Unknown
  Found in multiple species
ttaggaaggcgggggtctcga

SEQ ID NO: 1462 - DNA, 21 bp, Unknown
  Found in multiple species
ttagagcaaaagggtggtagt

SEQ ID NO: 1463 - DNA, 21 bp, Unknown
  Found in multiple species
ttactgccaagcctagcagca

SEQ ID NO: 1464 - DNA, 21 bp, Unknown
  Found in multiple species
ttactatggcggttgacagtg

SEQ ID NO: 1465 - DNA, 21 bp, Unknown
  Found in multiple species
ttacggcgcacaaattcttca

SEQ ID NO: 1466 - DNA, 21 bp, Unknown
  Found in multiple species
ttacctaccgccattgctgct

SEQ ID NO: 1467 - DNA, 21 bp, Unknown
  Found in multiple species
ttaccaggaaagctcatgaga

SEQ ID NO: 1468 - DNA, 21 bp, Unknown
  Found in multiple species
ttacaaaagagtgaagatgaa

SEQ ID NO: 1469 - DNA, 21 bp, Unknown
  Found in multiple species
tgttggatcctttaggaaagg

SEQ ID NO: 1470 - DNA, 21 bp, Unknown
  Found in multiple species
tgttaggaccaaagcggttgt

SEQ ID NO: 1471 - DNA, 21 bp, Unknown
  Found in multiple species
tgttacctaccgccattgctg

SEQ ID NO: 1472 - DNA, 21 bp, Unknown
  Found in multiple species
tgtgcttactatggcggttga

SEQ ID NO: 1473 - DNA, 21 bp, Unknown
  Found in multiple species
tgtcaaccgccatagtaagca

SEQ ID NO: 1474 - DNA, 21 bp, Unknown
  Found in multiple species
tgtattcaccattgagcgact

SEQ ID NO: 1475 - DNA, 21 bp, Unknown
  Found in multiple species
tgtagctcaagatcaaggtcc

SEQ ID NO: 1476 - DNA, 21 bp, Unknown
  Found in multiple species
tgtagcacctccaatgtagct

SEQ ID NO: 1477 - DNA, 21 bp, Unknown
  Found in multiple species
tgtaccggcgatgatactacc

SEQ ID NO: 1478 - DNA, 21 bp, Unknown
  Found in multiple species
tggtcctaacagaaaccggtc

SEQ ID NO: 1479 - DNA, 21 bp, Unknown
  Found in multiple species
tggtagtatcatcgccggtac

SEQ ID NO: 1480 - DNA, 21 bp, Unknown
  Found in multiple species
tggtaagattagggctggtct

SEQ ID NO: 1481 - DNA, 21 bp, Unknown
  Found in multiple species
tggtaaattaaggcctgttcc

SEQ ID NO: 1482 - DNA, 21 bp, Unknown
  Found in multiple species
tgggagtgagagtatggccaa

SEQ ID NO: 1483 - DNA, 21 bp, Unknown
  Found in multiple species
tgggaagagggtcctaatagt

SEQ ID NO: 1484 - DNA, 21 bp, Unknown
  Found in multiple species
tggcggttgacagtggattga

SEQ ID NO: 1485 - DNA, 21 bp, Unknown
  Found in multiple species
tggcggtaggtaacataatga

SEQ ID NO: 1486 - DNA, 21 bp, Unknown
  Found in multiple species
tggcccttaggtttaggaagg

SEQ ID NO: 1487 - DNA, 21 bp, Unknown
  Found in multiple species
tggccatactctcactcccag

SEQ ID NO: 1488 - DNA, 21 bp, Unknown
  Found in multiple species
tggcagtaaagtcaaactatc

SEQ ID NO: 1489 - DNA, 21 bp, Unknown
  Found in multiple species
tggatttatcagaatttttct

SEQ ID NO: 1490 - DNA, 21 bp, Unknown
  Found in multiple species
tggagtccgatggctatatct

SEQ ID NO: 1491 - DNA, 21 bp, Unknown
  Found in multiple species
tggaggattattcttcctttc

SEQ ID NO: 1492 - DNA, 21 bp, Unknown
  Found in multiple species
tggaccttagagcaaaagggt

SEQ ID NO: 1493 - DNA, 21 bp, Unknown
  Found in multiple species
tggaccggtttctgttaggac

SEQ ID NO: 1494 - DNA, 21 bp, Unknown
  Found in multiple species
tggacactttctaatattgat

SEQ ID NO: 1495 - DNA, 21 bp, Unknown
  Found in multiple species
tggaatggtaaattaaggcct

SEQ ID NO: 1496 - DNA, 21 bp, Unknown
  Found in multiple species
tggaaaggtctggaccttaga

SEQ ID NO: 1497 - DNA, 21 bp, Unknown
  Found in multiple species
tggaaactattaggaccctct

SEQ ID NO: 1498 - DNA, 21 bp, Unknown
  Found in multiple species
tgcttactatggcggttgaca

SEQ ID NO: 1499 - DNA, 21 bp, Unknown
  Found in multiple species
tgctgctaggcttggcagtaa

SEQ ID NO: 1500 - DNA, 21 bp, Unknown
  Found in multiple species
tgctctaaggtccagaccttt

SEQ ID NO: 1501 - DNA, 21 bp, Unknown
  Found in multiple species
tgctaggcttggcagtaaagt

SEQ ID NO: 1502 - DNA, 21 bp, Unknown
  Found in multiple species
tgcctttggccatactctcac

SEQ ID NO: 1503 - DNA, 21 bp, Unknown
  Found in multiple species
tgcctttcgcatttggattta

SEQ ID NO: 1504 - DNA, 21 bp, Unknown
  Found in multiple species
tgccaagcctagcagcaatgg

SEQ ID NO: 1505 - DNA, 21 bp, Unknown
  Found in multiple species
tgcatttggaaaggtctggac

SEQ ID NO: 1506 - DNA, 21 bp, Unknown
  Found in multiple species
tgcagctttcatactcaactt

SEQ ID NO: 1507 - DNA, 21 bp, Unknown
  Found in multiple species
tgcaagtagcctgcttcgtcc

SEQ ID NO: 1508 - DNA, 21 bp, Unknown
  Found in multiple species
tgatcttgagctacattggag

SEQ ID NO: 1509 - DNA, 21 bp, Unknown
  Found in multiple species
tgatctcatgagctttcctgg

SEQ ID NO: 1510 - DNA, 21 bp, Unknown
  Found in multiple species
tgatactaccacccttttgct

SEQ ID NO: 1511 - DNA, 21 bp, Unknown
  Found in multiple species
tgataagtcgctcaatggtga

SEQ ID NO: 1512 - DNA, 21 bp, Unknown
  Found in multiple species
tgataaatccaaatgcgaaag

SEQ ID NO: 1513 - DNA, 21 bp, Unknown
  Found in multiple species
tgagtgtaccggcgatgatac

SEQ ID NO: 1514 - DNA, 21 bp, Unknown
  Found in multiple species
tgagtatgaaagctgcatttg

SEQ ID NO: 1515 - DNA, 21 bp, Unknown
  Found in multiple species
tgagctttcctggtaagatta

SEQ ID NO: 1516 - DNA, 21 bp, Unknown
  Found in multiple species
tgagctacattggaggtgcta

SEQ ID NO: 1517 - DNA, 21 bp, Unknown
  Found in multiple species
tgagcgacttatcaatattag

SEQ ID NO: 1518 - DNA, 21 bp, Unknown
  Found in multiple species
tgagatcaaaaaagggaaggt

SEQ ID NO: 1519 - DNA, 21 bp, Unknown
  Found in multiple species
tgagagtatggccaaaggcaa

SEQ ID NO: 1520 - DNA, 21 bp, Unknown
  Found in multiple species
tgactttactgccaagcctag

SEQ ID NO: 1521 - DNA, 21 bp, Unknown
  Found in multiple species
tgacaaccgctttggtcctaa

SEQ ID NO: 1522 - DNA, 21 bp, Unknown
  Found in multiple species
tgaagaatttgtgcgccgtaa

SEQ ID NO: 1523 - DNA, 21 bp, Unknown
  Found in multiple species
tgaaagctgcatttggaaagg

SEQ ID NO: 1524 - DNA, 21 bp, Unknown
  Found in multiple species
tctttcaatccactgtcaacc

SEQ ID NO: 1525 - DNA, 21 bp, Unknown
  Found in multiple species
tcttgagctacattggaggtg

SEQ ID NO: 1526 - DNA, 21 bp, Unknown
  Found in multiple species
tcttaccaggaaagctcatga

SEQ ID NO: 1527 - DNA, 21 bp, Unknown
  Found in multiple species
tctgttaggaccaaagcggtt

SEQ ID NO: 1528 - DNA, 21 bp, Unknown
  Found in multiple species
tctgggagtgagagtatggcc

SEQ ID NO: 1529 - DNA, 21 bp, Unknown
  Found in multiple species
tctgggaagagggtcctaata

SEQ ID NO: 1530 - DNA, 21 bp, Unknown
  Found in multiple species
tctggcccttaggtttaggaa

SEQ ID NO: 1531 - DNA, 21 bp, Unknown
  Found in multiple species
tctggaccttagagcaaaagg

SEQ ID NO: 1532 - DNA, 21 bp, Unknown
  Found in multiple species
tctgataaatccaaatgcgaa

SEQ ID NO: 1533 - DNA, 21 bp, Unknown
  Found in multiple species
tctcatgagctttcctggtaa

SEQ ID NO: 1534 - DNA, 21 bp, Unknown
  Found in multiple species
tctcagaaaaattctgataaa

SEQ ID NO: 1535 - DNA, 21 bp, Unknown
  Found in multiple species
tctaatattgataagtcgctc

SEQ ID NO: 1536 - DNA, 21 bp, Unknown
  Found in multiple species
tctaaggtccagacctttcca

SEQ ID NO: 1537 - DNA, 21 bp, Unknown
  Found in multiple species
tcgcatttggatttatcagaa

SEQ ID NO: 1538 - DNA, 21 bp, Unknown
  Found in multiple species
tcgagacccccgccttcctaa

SEQ ID NO: 1539 - DNA, 21 bp, Unknown
  Found in multiple species
tcctgtgcttactatggcggt

SEQ ID NO: 1540 - DNA, 21 bp, Unknown
  Found in multiple species
tcctggtaagattagggctgg

SEQ ID NO: 1541 - DNA, 21 bp, Unknown
  Found in multiple species
tcctaatagtttccaaccctc

SEQ ID NO: 1542 - DNA, 21 bp, Unknown
  Found in multiple species
tcctaacagaaaccggtccat

SEQ ID NO: 1543 - DNA, 21 bp, Unknown
  Found in multiple species
tcctaaaggatccaacagtct

SEQ ID NO: 1544 - DNA, 21 bp, Unknown
  Found in multiple species
tcctaaacctaagggccagac

SEQ ID NO: 1545 - DNA, 21 bp, Unknown
  Found in multiple species
tccgcaagttcatcttcactc

SEQ ID NO: 1546 - DNA, 21 bp, Unknown
  Found in multiple species
tccgatggctatatctgggaa

SEQ ID NO: 1547 - DNA, 21 bp, Unknown
  Found in multiple species
tcccttttttgatctcatgag

SEQ ID NO: 1548 - DNA, 21 bp, Unknown
  Found in multiple species
tcccagatatagccatcggac

SEQ ID NO: 1549 - DNA, 21 bp, Unknown
  Found in multiple species
tccagacctttccaaatgcag

SEQ ID NO: 1550 - DNA, 21 bp, Unknown
  Found in multiple species
tccactgtcaaccgccatagt

SEQ ID NO: 1551 - DNA, 21 bp, Unknown
  Found in multiple species
tccaatgtagctcaagatcaa

SEQ ID NO: 1552 - DNA, 21 bp, Unknown
  Found in multiple species
tccaacagtctggcccttagg

SEQ ID NO: 1553 - DNA, 21 bp, Unknown
  Found in multiple species
tccaaatgcgaaaggcagccg

SEQ ID NO: 1554 - DNA, 21 bp, Unknown
  Found in multiple species
tccaaatgcagctttcatact

SEQ ID NO: 1555 - DNA, 21 bp, Unknown
  Found in multiple species
tcattatgttacctaccgcca

SEQ ID NO: 1556 - DNA, 21 bp, Unknown
  Found in multiple species
tcatgagctttcctggtaaga

SEQ ID NO: 1557 - DNA, 21 bp, Unknown
  Found in multiple species
tcatgagatcaaaaaagggaa

SEQ ID NO: 1558 - DNA, 21 bp, Unknown
  Found in multiple species
tcatgacaaccgctttggtcc

SEQ ID NO: 1559 - DNA, 21 bp, Unknown
  Found in multiple species
tcatcttcactcttttgtaat

SEQ ID NO: 1560 - DNA, 21 bp, Unknown
  Found in multiple species
tcatacattgcaagtagcctg

SEQ ID NO: 1561 - DNA, 21 bp, Unknown
  Found in multiple species
tcaggaaaggaagaataatcc

SEQ ID NO: 1562 - DNA, 21 bp, Unknown
  Found in multiple species
tcagaatttttctgagatcct

SEQ ID NO: 1563 - DNA, 21 bp, Unknown
  Found in multiple species
tcagaaaaattctgataaatc

SEQ ID NO: 1564 - DNA, 21 bp, Unknown
  Found in multiple species
tcaccattgagcgacttatca

SEQ ID NO: 1565 - DNA, 21 bp, Unknown
  Found in multiple species
tcaatccactgtcaaccgcca

SEQ ID NO: 1566 - DNA, 21 bp, Unknown
  Found in multiple species
tcaaccgccatagtaagcaca

SEQ ID NO: 1567 - DNA, 21 bp, Unknown
  Found in multiple species
tcaaacacccgatggaccggt

SEQ ID NO: 1568 - DNA, 21 bp, Unknown
  Found in multiple species
tcaaaaaagggaaggtccgta

SEQ ID NO: 1569 - DNA, 21 bp, Unknown
  Found in multiple species
tattgataagtcgctcaatgg

SEQ ID NO: 1570 - DNA, 21 bp, Unknown
  Found in multiple species
tattcttcctttcctgaatag

SEQ ID NO: 1571 - DNA, 21 bp, Unknown
  Found in multiple species
tattcaggaaaggaagaataa

SEQ ID NO: 1572 - DNA, 21 bp, Unknown
  Found in multiple species
tattcaccattgagcgactta

SEQ ID NO: 1573 - DNA, 21 bp, Unknown
  Found in multiple species
tattaggaccctcttcccaga

SEQ ID NO: 1574 - DNA, 21 bp, Unknown
  Found in multiple species
tattacaaaagagtgaagatg

SEQ ID NO: 1575 - DNA, 21 bp, Unknown
  Found in multiple species
tatgttacctaccgccattgc

SEQ ID NO: 1576 - DNA, 21 bp, Unknown
  Found in multiple species
tatggcggttgacagtggatt

SEQ ID NO: 1577 - DNA, 21 bp, Unknown
  Found in multiple species
tatgaaagctgcatttggaaa

SEQ ID NO: 1578 - DNA, 21 bp, Unknown
  Found in multiple species
tatctgggaagagggtcctaa

SEQ ID NO: 1579 - DNA, 21 bp, Unknown
  Found in multiple species
tatcatcgccggtacactcaa

SEQ ID NO: 1580 - DNA, 21 bp, Unknown
  Found in multiple species
tatcagaatttttctgagatc

SEQ ID NO: 1581 - DNA, 21 bp, Unknown
  Found in multiple species
tatcaatattagaaagtgtcc

SEQ ID NO: 1582 - DNA, 21 bp, Unknown
  Found in multiple species
tatcaaacacccgatggaccg

SEQ ID NO: 1583 - DNA, 21 bp, Unknown
  Found in multiple species
tatatctgggaagagggtcct

SEQ ID NO: 1584 - DNA, 21 bp, Unknown
  Found in multiple species
tatagccatcggactccatgg

SEQ ID NO: 1585 - DNA, 21 bp, Unknown
  Found in multiple species
tagtttgactttactgccaag

SEQ ID NO: 1586 - DNA, 21 bp, Unknown
  Found in multiple species
tagtatcatcgccggtacact

SEQ ID NO: 1587 - DNA, 21 bp, Unknown
  Found in multiple species
taggtttaggaaggcgggggt

SEQ ID NO: 1588 - DNA, 21 bp, Unknown
  Found in multiple species
taggcttggcagtaaagtcaa

SEQ ID NO: 1589 - DNA, 21 bp, Unknown
  Found in multiple species
taggaccttgatcttgagcta

SEQ ID NO: 1590 - DNA, 21 bp, Unknown
  Found in multiple species
taggaccctcttcccagatat

SEQ ID NO: 1591 - DNA, 21 bp, Unknown
  Found in multiple species
taggaccaaagcggttgtcat

SEQ ID NO: 1592 - DNA, 21 bp, Unknown
  Found in multiple species
taggaaggcgggggtctcgag

SEQ ID NO: 1593 - DNA, 21 bp, Unknown
  Found in multiple species
tagctcaagatcaaggtccta

SEQ ID NO: 1594 - DNA, 21 bp, Unknown
  Found in multiple species
tagccatcggactccatggta

SEQ ID NO: 1595 - DNA, 21 bp, Unknown
  Found in multiple species
tagcagcaatggcggtaggta

SEQ ID NO: 1596 - DNA, 21 bp, Unknown
  Found in multiple species
tagcacctccaatgtagctca

SEQ ID NO: 1597 - DNA, 21 bp, Unknown
  Found in multiple species
tagagcaaaagggtggtagta

SEQ ID NO: 1598 - DNA, 21 bp, Unknown
  Found in multiple species
tactgccaagcctagcagcaa

SEQ ID NO: 1599 - DNA, 21 bp, Unknown
  Found in multiple species
tactatggcggttgacagtgg

SEQ ID NO: 1600 - DNA, 21 bp, Unknown
  Found in multiple species
tactaccacccttttgctcta

SEQ ID NO: 1601 - DNA, 21 bp, Unknown
  Found in multiple species
tacggcgcacaaattcttcaa

SEQ ID NO: 1602 - DNA, 21 bp, Unknown
  Found in multiple species
tacggaccttcccttttttga

SEQ ID NO: 1603 - DNA, 21 bp, Unknown
  Found in multiple species
tacctaccgccattgctgcta

SEQ ID NO: 1604 - DNA, 21 bp, Unknown
  Found in multiple species
taccggcgatgatactaccac

SEQ ID NO: 1605 - DNA, 21 bp, Unknown
  Found in multiple species
taccgccattgctgctaggct

SEQ ID NO: 1606 - DNA, 21 bp, Unknown
  Found in multiple species
taccatggagtccgatggcta

SEQ ID NO: 1607 - DNA, 21 bp, Unknown
  Found in multiple species
taccaggaaagctcatgagat

SEQ ID NO: 1608 - DNA, 21 bp, Unknown
  Found in multiple species
taccacccttttgctctaagg

SEQ ID NO: 1609 - DNA, 21 bp, Unknown
  Found in multiple species
tacattgcaagtagcctgctt

SEQ ID NO: 1610 - DNA, 21 bp, Unknown
  Found in multiple species
tacaaaagagtgaagatgaac

SEQ ID NO: 1611 - DNA, 21 bp, Unknown
  Found in multiple species
taatcttaccaggaaagctca

SEQ ID NO: 1612 - DNA, 21 bp, Unknown
  Found in multiple species
taatattgataagtcgctcaa

SEQ ID NO: 1613 - DNA, 21 bp, Unknown
  Found in multiple species
taagtcgctcaatggtgaata

SEQ ID NO: 1614 - DNA, 21 bp, Unknown
  Found in multiple species
taaggtccagacctttccaaa

SEQ ID NO: 1615 - DNA, 21 bp, Unknown
  Found in multiple species
taagggccagactgttggatc

SEQ ID NO: 1616 - DNA, 21 bp, Unknown
  Found in multiple species
taagattagggctggtcttgg

SEQ ID NO: 1617 - DNA, 21 bp, Unknown
  Found in multiple species
taacagaaaccggtccatcgg

SEQ ID NO: 1618 - DNA, 21 bp, Unknown
  Found in multiple species
taaattaaggcctgttccttc

SEQ ID NO: 1619 - DNA, 21 bp, Unknown
  Found in multiple species
taaatccaaatgcgaaaggca

SEQ ID NO: 1620 - DNA, 21 bp, Unknown
  Found in multiple species
taaaggatccaacagtctggc

SEQ ID NO: 1621 - DNA, 21 bp, Unknown
  Found in multiple species
taaacctaagggccagactgt

SEQ ID NO: 1622 - DNA, 21 bp, Unknown
  Found in multiple species
gtttgactttactgccaagcc

SEQ ID NO: 1623 - DNA, 21 bp, Unknown
  Found in multiple species
gtttctgttaggaccaaagcg

SEQ ID NO: 1624 - DNA, 21 bp, Unknown
  Found in multiple species
gtttaggaaggcgggggtctc

SEQ ID NO: 1625 - DNA, 21 bp, Unknown
  Found in multiple species
gttggaaactattaggaccct

SEQ ID NO: 1626 - DNA, 21 bp, Unknown
  Found in multiple species
gttgagtatgaaagctgcatt

SEQ ID NO: 1627 - DNA, 21 bp, Unknown
  Found in multiple species
gttgaagaatttgtgcgccgt

SEQ ID NO: 1628 - DNA, 21 bp, Unknown
  Found in multiple species
gttctgggagtgagagtatgg

SEQ ID NO: 1629 - DNA, 21 bp, Unknown
  Found in multiple species
gttcatcttcactcttttgta

SEQ ID NO: 1630 - DNA, 21 bp, Unknown
  Found in multiple species
gttaggaccaaagcggttgtc

SEQ ID NO: 1631 - DNA, 21 bp, Unknown
  Found in multiple species
gttacctaccgccattgctgc

SEQ ID NO: 1632 - DNA, 21 bp, Unknown
  Found in multiple species
gtgtaccggcgatgatactac

SEQ ID NO: 1633 - DNA, 21 bp, Unknown
  Found in multiple species
gtggtagtatcatcgccggta

SEQ ID NO: 1634 - DNA, 21 bp, Unknown
  Found in multiple species
gtggaggattattcttccttt

SEQ ID NO: 1635 - DNA, 21 bp, Unknown
  Found in multiple species
gtgcttactatggcggttgac

SEQ ID NO: 1636 - DNA, 21 bp, Unknown
  Found in multiple species
gtgagagtatggccaaaggca

SEQ ID NO: 1637 - DNA, 21 bp, Unknown
  Found in multiple species
gtctggcccttaggtttagga

SEQ ID NO: 1638 - DNA, 21 bp, Unknown
  Found in multiple species
gtctggaccttagagcaaaag

SEQ ID NO: 1639 - DNA, 21 bp, Unknown
  Found in multiple species
gtcctaatagtttccaaccct

SEQ ID NO: 1640 - DNA, 21 bp, Unknown
  Found in multiple species
gtcctaacagaaaccggtcca

SEQ ID NO: 1641 - DNA, 21 bp, Unknown
  Found in multiple species
gtccgatggctatatctggga

SEQ ID NO: 1642 - DNA, 21 bp, Unknown
  Found in multiple species
gtccagacctttccaaatgca

SEQ ID NO: 1643 - DNA, 21 bp, Unknown
  Found in multiple species
gtcatgacaaccgctttggtc

SEQ ID NO: 1644 - DNA, 21 bp, Unknown
  Found in multiple species
gtcaaccgccatagtaagcac

SEQ ID NO: 1645 - DNA, 21 bp, Unknown
  Found in multiple species
gtattcaccattgagcgactt

SEQ ID NO: 1646 - DNA, 21 bp, Unknown
  Found in multiple species
gtatgaaagctgcatttggaa

SEQ ID NO: 1647 - DNA, 21 bp, Unknown
  Found in multiple species
gtatcatcgccggtacactca

SEQ ID NO: 1648 - DNA, 21 bp, Unknown
  Found in multiple species
gtagtatcatcgccggtacac

SEQ ID NO: 1649 - DNA, 21 bp, Unknown
  Found in multiple species
gtagctcaagatcaaggtcct

SEQ ID NO: 1650 - DNA, 21 bp, Unknown
  Found in multiple species
gtagcacctccaatgtagctc

SEQ ID NO: 1651 - DNA, 21 bp, Unknown
  Found in multiple species
gtaccggcgatgatactacca

SEQ ID NO: 1652 - DNA, 21 bp, Unknown
  Found in multiple species
gtaagattagggctggtcttg

SEQ ID NO: 1653 - DNA, 21 bp, Unknown
  Found in multiple species
gtaaattaaggcctgttcctt

SEQ ID NO: 1654 - DNA, 21 bp, Unknown
  Found in multiple species
ggtttctgttaggaccaaagc

SEQ ID NO: 1655 - DNA, 21 bp, Unknown
  Found in multiple species
ggtttaggaaggcgggggtct

SEQ ID NO: 1656 - DNA, 21 bp, Unknown
  Found in multiple species
ggttggaaactattaggaccc

SEQ ID NO: 1657 - DNA, 21 bp, Unknown
  Found in multiple species
ggttgacagtggattgaaaga

SEQ ID NO: 1658 - DNA, 21 bp, Unknown
  Found in multiple species
ggtggtagtatcatcgccggt

SEQ ID NO: 1659 - DNA, 21 bp, Unknown
  Found in multiple species
ggtggaggattattcttcctt

SEQ ID NO: 1660 - DNA, 21 bp, Unknown
  Found in multiple species
ggtctggaccttagagcaaaa

SEQ ID NO: 1661 - DNA, 21 bp, Unknown
  Found in multiple species
ggtcctaatagtttccaaccc

SEQ ID NO: 1662 - DNA, 21 bp, Unknown
  Found in multiple species
ggtcctaacagaaaccggtcc

SEQ ID NO: 1663 - DNA, 21 bp, Unknown
  Found in multiple species
ggtccagacctttccaaatgc

SEQ ID NO: 1664 - DNA, 21 bp, Unknown
  Found in multiple species
ggtagtatcatcgccggtaca

SEQ ID NO: 1665 - DNA, 21 bp, Unknown
  Found in multiple species
ggtaagattagggctggtctt

SEQ ID NO: 1666 - DNA, 21 bp, Unknown
  Found in multiple species
ggtaaattaaggcctgttcct

SEQ ID NO: 1667 - DNA, 21 bp, Unknown
  Found in multiple species
gggttggaaactattaggacc

SEQ ID NO: 1668 - DNA, 21 bp, Unknown
  Found in multiple species
gggtggtagtatcatcgccgg

SEQ ID NO: 1669 - DNA, 21 bp, Unknown
  Found in multiple species
gggtcctaatagtttccaacc

SEQ ID NO: 1670 - DNA, 21 bp, Unknown
  Found in multiple species
gggccagactgttggatcctt

SEQ ID NO: 1671 - DNA, 21 bp, Unknown
  Found in multiple species
gggagtgagagtatggccaaa

SEQ ID NO: 1672 - DNA, 21 bp, Unknown
  Found in multiple species
gggaagagggtcctaatagtt

SEQ ID NO: 1673 - DNA, 21 bp, Unknown
  Found in multiple species
ggcttggcagtaaagtcaaac

SEQ ID NO: 1674 - DNA, 21 bp, Unknown
  Found in multiple species
ggctgcctttcgcatttggat

SEQ ID NO: 1675 - DNA, 21 bp, Unknown
  Found in multiple species
ggctatatctgggaagagggt

SEQ ID NO: 1676 - DNA, 21 bp, Unknown
  Found in multiple species
ggctacttgcaatgtatgaag

SEQ ID NO: 1677 - DNA, 21 bp, Unknown
  Found in multiple species
ggcggttgacagtggattgaa

SEQ ID NO: 1678 - DNA, 21 bp, Unknown
  Found in multiple species
ggcggtaggtaacataatgag

SEQ ID NO: 1679 - DNA, 21 bp, Unknown
  Found in multiple species
ggcgatgatactaccaccctt

SEQ ID NO: 1680 - DNA, 21 bp, Unknown
  Found in multiple species
ggcccttaggtttaggaaggc

SEQ ID NO: 1681 - DNA, 21 bp, Unknown
  Found in multiple species
ggccatactctcactcccaga

SEQ ID NO: 1682 - DNA, 21 bp, Unknown
  Found in multiple species
ggccagactgttggatccttt

SEQ ID NO: 1683 - DNA, 21 bp, Unknown
  Found in multiple species
ggatttatcagaatttttctg

SEQ ID NO: 1684 - DNA, 21 bp, Unknown
  Found in multiple species
ggattattcttcctttcctga

SEQ ID NO: 1685 - DNA, 21 bp, Unknown
  Found in multiple species
ggatctcagaaaaattctgat

SEQ ID NO: 1686 - DNA, 21 bp, Unknown
  Found in multiple species
ggatccaacagtctggccctt

SEQ ID NO: 1687 - DNA, 21 bp, Unknown
  Found in multiple species
ggagtgagagtatggccaaag

SEQ ID NO: 1688 - DNA, 21 bp, Unknown
  Found in multiple species
ggagtccgatggctatatctg

SEQ ID NO: 1689 - DNA, 21 bp, Unknown
  Found in multiple species
ggaggattattcttcctttcc

SEQ ID NO: 1690 - DNA, 21 bp, Unknown
  Found in multiple species
ggacgaagcaggctacttgca

SEQ ID NO: 1691 - DNA, 21 bp, Unknown
  Found in multiple species
ggaccttgatcttgagctaca

SEQ ID NO: 1692 - DNA, 21 bp, Unknown
  Found in multiple species
ggaccttcccttttttgatct

SEQ ID NO: 1693 - DNA, 21 bp, Unknown
  Found in multiple species
ggaccttagagcaaaagggtg

SEQ ID NO: 1694 - DNA, 21 bp, Unknown
  Found in multiple species
ggaccggtttctgttaggacc

SEQ ID NO: 1695 - DNA, 21 bp, Unknown
  Found in multiple species
ggaccctcttcccagatatag

SEQ ID NO: 1696 - DNA, 21 bp, Unknown
  Found in multiple species
ggaccaaagcggttgtcatga

SEQ ID NO: 1697 - DNA, 21 bp, Unknown
  Found in multiple species
ggacactttctaatattgata

SEQ ID NO: 1698 - DNA, 21 bp, Unknown
  Found in multiple species
ggaatggtaaattaaggcctg

SEQ ID NO: 1699 - DNA, 21 bp, Unknown
  Found in multiple species
ggaagagggtcctaatagttt

SEQ ID NO: 1700 - DNA, 21 bp, Unknown
  Found in multiple species
ggaacaggccttaatttacca

SEQ ID NO: 1701 - DNA, 21 bp, Unknown
  Found in multiple species
ggaaaggtctggaccttagag

SEQ ID NO: 1702 - DNA, 21 bp, Unknown
  Found in multiple species
ggaaaggaagaataatcctcc

SEQ ID NO: 1703 - DNA, 21 bp, Unknown
  Found in multiple species
ggaaagctcatgagatcaaaa

SEQ ID NO: 1704 - DNA, 21 bp, Unknown
  Found in multiple species
ggaaactattaggaccctctt

SEQ ID NO: 1705 - DNA, 21 bp, Unknown
  Found in multiple species
gctttggtcctaacagaaacc

SEQ ID NO: 1706 - DNA, 21 bp, Unknown
  Found in multiple species
gctttcctggtaagattaggg

SEQ ID NO: 1707 - DNA, 21 bp, Unknown
  Found in multiple species
gcttggcagtaaagtcaaact

SEQ ID NO: 1708 - DNA, 21 bp, Unknown
  Found in multiple species
gcttactatggcggttgacag

SEQ ID NO: 1709 - DNA, 21 bp, Unknown
  Found in multiple species
gctgctaggcttggcagtaaa

SEQ ID NO: 1710 - DNA, 21 bp, Unknown
  Found in multiple species
gctgcctttcgcatttggatt

SEQ ID NO: 1711 - DNA, 21 bp, Unknown
  Found in multiple species
gctgcatttggaaaggtctgg

SEQ ID NO: 1712 - DNA, 21 bp, Unknown
  Found in multiple species
gctctaaggtccagacctttc

SEQ ID NO: 1713 - DNA, 21 bp, Unknown
  Found in multiple species
gctcatgagatcaaaaaaggg

SEQ ID NO: 1714 - DNA, 21 bp, Unknown
  Found in multiple species
gctatatctgggaagagggtc

SEQ ID NO: 1715 - DNA, 21 bp, Unknown
  Found in multiple species
gctaggcttggcagtaaagtc

SEQ ID NO: 1716 - DNA, 21 bp, Unknown
  Found in multiple species
gctacttgcaatgtatgaagg

SEQ ID NO: 1717 - DNA, 21 bp, Unknown
  Found in multiple species
gctacattggaggtgctacaa

SEQ ID NO: 1718 - DNA, 21 bp, Unknown
  Found in multiple species
gcggttgacagtggattgaaa

SEQ ID NO: 1719 - DNA, 21 bp, Unknown
  Found in multiple species
gcgatgatactaccacccttt

SEQ ID NO: 1720 - DNA, 21 bp, Unknown
  Found in multiple species
gcgacttatcaatattagaaa

SEQ ID NO: 1721 - DNA, 21 bp, Unknown
  Found in multiple species
gcctttggccatactctcact

SEQ ID NO: 1722 - DNA, 21 bp, Unknown
  Found in multiple species
gcctttcgcatttggatttat

SEQ ID NO: 1723 - DNA, 21 bp, Unknown
  Found in multiple species
gccttcctaaacctaagggcc

SEQ ID NO: 1724 - DNA, 21 bp, Unknown
  Found in multiple species
gcctagcagcaatggcggtag

SEQ ID NO: 1725 - DNA, 21 bp, Unknown
  Found in multiple species
gcccttaggtttaggaaggcg

SEQ ID NO: 1726 - DNA, 21 bp, Unknown
  Found in multiple species
gccctaatcttaccaggaaag

SEQ ID NO: 1727 - DNA, 21 bp, Unknown
  Found in multiple species
gccattgctgctaggcttggc

SEQ ID NO: 1728 - DNA, 21 bp, Unknown
  Found in multiple species
gccatcggactccatggtagt

SEQ ID NO: 1729 - DNA, 21 bp, Unknown
  Found in multiple species
gccatactctcactcccagaa

SEQ ID NO: 1730 - DNA, 21 bp, Unknown
  Found in multiple species
gccagactgttggatccttta

SEQ ID NO: 1731 - DNA, 21 bp, Unknown
  Found in multiple species
gccaagcctagcagcaatggc

SEQ ID NO: 1732 - DNA, 21 bp, Unknown
  Found in multiple species
gcatttggatttatcagaatt

SEQ ID NO: 1733 - DNA, 21 bp, Unknown
  Found in multiple species
gcatttggaaaggtctggacc

SEQ ID NO: 1734 - DNA, 21 bp, Unknown
  Found in multiple species
gcaggctacttgcaatgtatg

SEQ ID NO: 1735 - DNA, 21 bp, Unknown
  Found in multiple species
gcagctttcatactcaacttt

SEQ ID NO: 1736 - DNA, 21 bp, Unknown
  Found in multiple species
gcagcaatggcggtaggtaac

SEQ ID NO: 1737 - DNA, 21 bp, Unknown
  Found in multiple species
gcacctccaatgtagctcaag

SEQ ID NO: 1738 - DNA, 21 bp, Unknown
  Found in multiple species
gcaccaagaccagccctaatc

SEQ ID NO: 1739 - DNA, 21 bp, Unknown
  Found in multiple species
gcaatggcggtaggtaacata

SEQ ID NO: 1740 - DNA, 21 bp, Unknown
  Found in multiple species
gcaagttcatcttcactcttt

SEQ ID NO: 1741 - DNA, 21 bp, Unknown
  Found in multiple species
gcaaaagggtggtagtatcat

SEQ ID NO: 1742 - DNA, 21 bp, Unknown
  Found in multiple species
gatttatcagaatttttctga

SEQ ID NO: 1743 - DNA, 21 bp, Unknown
  Found in multiple species
gattattcttcctttcctgaa

SEQ ID NO: 1744 - DNA, 21 bp, Unknown
  Found in multiple species
gattagggctggtcttggtgc

SEQ ID NO: 1745 - DNA, 21 bp, Unknown
  Found in multiple species
gattacggcgcacaaattctt

SEQ ID NO: 1746 - DNA, 21 bp, Unknown
  Found in multiple species
gatgttgctgcagattctctt

SEQ ID NO: 1747 - DNA, 21 bp, Unknown
  Found in multiple species
gatggaccggtttctgttagg

SEQ ID NO: 1748 - DNA, 21 bp, Unknown
  Found in multiple species
gatgatactaccacccttttg

SEQ ID NO: 1749 - DNA, 21 bp, Unknown
  Found in multiple species
gatcttgagctacattggagg

SEQ ID NO: 1750 - DNA, 21 bp, Unknown
  Found in multiple species
gatctcatgagctttcctggt

SEQ ID NO: 1751 - DNA, 21 bp, Unknown
  Found in multiple species
gatctcagaaaaattctgata

SEQ ID NO: 1752 - DNA, 21 bp, Unknown
  Found in multiple species
gatcctgtgcttactatggcg

SEQ ID NO: 1753 - DNA, 21 bp, Unknown
  Found in multiple species
gatccaacagtctggccctta

SEQ ID NO: 1754 - DNA, 21 bp, Unknown
  Found in multiple species
gatcaaaaaagggaaggtccg

SEQ ID NO: 1755 - DNA, 21 bp, Unknown
  Found in multiple species
gatatagccatcggactccat

SEQ ID NO: 1756 - DNA, 21 bp, Unknown
  Found in multiple species
gatagtttgactttactgcca

SEQ ID NO: 1757 - DNA, 21 bp, Unknown
  Found in multiple species
gatactaccacccttttgctc

SEQ ID NO: 1758 - DNA, 21 bp, Unknown
  Found in multiple species
gataagtcgctcaatggtgaa

SEQ ID NO: 1759 - DNA, 21 bp, Unknown
  Found in multiple species
gataaatccaaatgcgaaagg

SEQ ID NO: 1760 - DNA, 21 bp, Unknown
  Found in multiple species
gagtgtaccggcgatgatact

SEQ ID NO: 1761 - DNA, 21 bp, Unknown
  Found in multiple species
gagtgagagtatggccaaagg

SEQ ID NO: 1762 - DNA, 21 bp, Unknown
  Found in multiple species
gagtgaagatgaacttgcgga

SEQ ID NO: 1763 - DNA, 21 bp, Unknown
  Found in multiple species
gagtccgatggctatatctgg

SEQ ID NO: 1764 - DNA, 21 bp, Unknown
  Found in multiple species
gagtatgaaagctgcatttgg

SEQ ID NO: 1765 - DNA, 21 bp, Unknown
  Found in multiple species
gagggttggaaactattagga

SEQ ID NO: 1766 - DNA, 21 bp, Unknown
  Found in multiple species
gagggtcctaatagtttccaa

SEQ ID NO: 1767 - DNA, 21 bp, Unknown
  Found in multiple species
gaggattattcttcctttcct

SEQ ID NO: 1768 - DNA, 21 bp, Unknown
  Found in multiple species
gagctttcctggtaagattag

SEQ ID NO: 1769 - DNA, 21 bp, Unknown
  Found in multiple species
gagctacattggaggtgctac

SEQ ID NO: 1770 - DNA, 21 bp, Unknown
  Found in multiple species
gagcgacttatcaatattaga

SEQ ID NO: 1771 - DNA, 21 bp, Unknown
  Found in multiple species
gagcaaaagggtggtagtatc

SEQ ID NO: 1772 - DNA, 21 bp, Unknown
  Found in multiple species
gagattacggcgcacaaattc

SEQ ID NO: 1773 - DNA, 21 bp, Unknown
  Found in multiple species
gagatcaaaaaagggaaggtc

SEQ ID NO: 1774 - DNA, 21 bp, Unknown
  Found in multiple species
gagagtatggccaaaggcaat

SEQ ID NO: 1775 - DNA, 21 bp, Unknown
  Found in multiple species
gagacccccgccttcctaaac

SEQ ID NO: 1776 - DNA, 21 bp, Unknown
  Found in multiple species
gactttactgccaagcctagc

SEQ ID NO: 1777 - DNA, 21 bp, Unknown
  Found in multiple species
gacttatcaatattagaaagt

SEQ ID NO: 1778 - DNA, 21 bp, Unknown
  Found in multiple species
gactgttggatcctttaggaa

SEQ ID NO: 1779 - DNA, 21 bp, Unknown
  Found in multiple species
gacgaagcaggctacttgcaa

SEQ ID NO: 1780 - DNA, 21 bp, Unknown
  Found in multiple species
gacctttccaaatgcagcttt

SEQ ID NO: 1781 - DNA, 21 bp, Unknown
  Found in multiple species
gaccttgatcttgagctacat

SEQ ID NO: 1782 - DNA, 21 bp, Unknown
  Found in multiple species
gaccttcccttttttgatctc

SEQ ID NO: 1783 - DNA, 21 bp, Unknown
  Found in multiple species
gaccttagagcaaaagggtgg

SEQ ID NO: 1784 - DNA, 21 bp, Unknown
  Found in multiple species
gaccggtttctgttaggacca

SEQ ID NO: 1785 - DNA, 21 bp, Unknown
  Found in multiple species
gaccctcttcccagatatagc

SEQ ID NO: 1786 - DNA, 21 bp, Unknown
  Found in multiple species
gacccccgccttcctaaacct

SEQ ID NO: 1787 - DNA, 21 bp, Unknown
  Found in multiple species
gaccagccctaatcttaccag

SEQ ID NO: 1788 - DNA, 21 bp, Unknown
  Found in multiple species
gaccaaagcggttgtcatgac

SEQ ID NO: 1789 - DNA, 21 bp, Unknown
  Found in multiple species
gacactttctaatattgataa

SEQ ID NO: 1790 - DNA, 21 bp, Unknown
  Found in multiple species
gacaaccgctttggtcctaac

SEQ ID NO: 1791 - DNA, 21 bp, Unknown
  Found in multiple species
gaatttgtgcgccgtaatctc

SEQ ID NO: 1792 - DNA, 21 bp, Unknown
  Found in multiple species
gaatggtaaattaaggcctgt

SEQ ID NO: 1793 - DNA, 21 bp, Unknown
  Found in multiple species
gaaggaacaggccttaattta

SEQ ID NO: 1794 - DNA, 21 bp, Unknown
  Found in multiple species
gaagcaggctacttgcaatgt

SEQ ID NO: 1795 - DNA, 21 bp, Unknown
  Found in multiple species
gaagagggtcctaatagtttc

SEQ ID NO: 1796 - DNA, 21 bp, Unknown
  Found in multiple species
gaagaatttgtgcgccgtaat

SEQ ID NO: 1797 - DNA, 21 bp, Unknown
  Found in multiple species
gaacaggccttaatttaccat

SEQ ID NO: 1798 - DNA, 21 bp, Unknown
  Found in multiple species
gaaaggtctggaccttagagc

SEQ ID NO: 1799 - DNA, 21 bp, Unknown
  Found in multiple species
gaaaggaagaataatcctcca

SEQ ID NO: 1800 - DNA, 21 bp, Unknown
  Found in multiple species
gaaagctgcatttggaaaggt

SEQ ID NO: 1801 - DNA, 21 bp, Unknown
  Found in multiple species
gaaagctcatgagatcaaaaa

SEQ ID NO: 1802 - DNA, 21 bp, Unknown
  Found in multiple species
gaaactattaggaccctcttc

SEQ ID NO: 1803 - DNA, 21 bp, Unknown
  Found in multiple species
gaaaccggtccatcgggtgtt

SEQ ID NO: 1804 - DNA, 21 bp, Unknown
  Found in multiple species
gaaaaattctgataaatccaa

SEQ ID NO: 1805 - DNA, 21 bp, Unknown
  Found in multiple species
cttttttgatctcatgagctt

SEQ ID NO: 1806 - DNA, 21 bp, Unknown
  Found in multiple species
cttttgctctaaggtccagac

SEQ ID NO: 1807 - DNA, 21 bp, Unknown
  Found in multiple species
ctttggtcctaacagaaaccg

SEQ ID NO: 1808 - DNA, 21 bp, Unknown
  Found in multiple species
ctttggccatactctcactcc

SEQ ID NO: 1809 - DNA, 21 bp, Unknown
  Found in multiple species
ctttctaatattgataagtcg

SEQ ID NO: 1810 - DNA, 21 bp, Unknown
  Found in multiple species
ctttcgcatttggatttatca

SEQ ID NO: 1811 - DNA, 21 bp, Unknown
  Found in multiple species
ctttcctggtaagattagggc

SEQ ID NO: 1812 - DNA, 21 bp, Unknown
  Found in multiple species
ctttcctaaaggatccaacag

SEQ ID NO: 1813 - DNA, 21 bp, Unknown
  Found in multiple species
ctttccaaatgcagctttcat

SEQ ID NO: 1814 - DNA, 21 bp, Unknown
  Found in multiple species
ctttcaatccactgtcaaccg

SEQ ID NO: 1815 - DNA, 21 bp, Unknown
  Found in multiple species
ctttactgccaagcctagcag

SEQ ID NO: 1816 - DNA, 21 bp, Unknown
  Found in multiple species
cttggcagtaaagtcaaacta

SEQ ID NO: 1817 - DNA, 21 bp, Unknown
  Found in multiple species
cttgatcttgagctacattgg

SEQ ID NO: 1818 - DNA, 21 bp, Unknown
  Found in multiple species
cttgagctacattggaggtgc

SEQ ID NO: 1819 - DNA, 21 bp, Unknown
  Found in multiple species
cttcctaaacctaagggccag

SEQ ID NO: 1820 - DNA, 21 bp, Unknown
  Found in multiple species
cttcccttttttgatctcatg

SEQ ID NO: 1821 - DNA, 21 bp, Unknown
  Found in multiple species
cttcatacattgcaagtagcc

SEQ ID NO: 1822 - DNA, 21 bp, Unknown
  Found in multiple species
cttatcaatattagaaagtgt

SEQ ID NO: 1823 - DNA, 21 bp, Unknown
  Found in multiple species
cttaggtttaggaaggcgggg

SEQ ID NO: 1824 - DNA, 21 bp, Unknown
  Found in multiple species
cttagagcaaaagggtggtag

SEQ ID NO: 1825 - DNA, 21 bp, Unknown
  Found in multiple species
cttactatggcggttgacagt

SEQ ID NO: 1826 - DNA, 21 bp, Unknown
  Found in multiple species
cttaccaggaaagctcatgag

SEQ ID NO: 1827 - DNA, 21 bp, Unknown
  Found in multiple species
ctgttggatcctttaggaaag

SEQ ID NO: 1828 - DNA, 21 bp, Unknown
  Found in multiple species
ctgttaggaccaaagcggttg

SEQ ID NO: 1829 - DNA, 21 bp, Unknown
  Found in multiple species
ctgtgcttactatggcggttg

SEQ ID NO: 1830 - DNA, 21 bp, Unknown
  Found in multiple species
ctgtcaaccgccatagtaagc

SEQ ID NO: 1831 - DNA, 21 bp, Unknown
  Found in multiple species
ctggtaagattagggctggtc

SEQ ID NO: 1832 - DNA, 21 bp, Unknown
  Found in multiple species
ctgggagtgagagtatggcca

SEQ ID NO: 1833 - DNA, 21 bp, Unknown
  Found in multiple species
ctgggaagagggtcctaatag

SEQ ID NO: 1834 - DNA, 21 bp, Unknown
  Found in multiple species
ctggcccttaggtttaggaag

SEQ ID NO: 1835 - DNA, 21 bp, Unknown
  Found in multiple species
ctggaccttagagcaaaaggg

SEQ ID NO: 1836 - DNA, 21 bp, Unknown
  Found in multiple species
ctgctaggcttggcagtaaag

SEQ ID NO: 1837 - DNA, 21 bp, Unknown
  Found in multiple species
ctgcctttcgcatttggattt

SEQ ID NO: 1838 - DNA, 21 bp, Unknown
  Found in multiple species
ctgccaagcctagcagcaatg

SEQ ID NO: 1839 - DNA, 21 bp, Unknown
  Found in multiple species
ctgcatttggaaaggtctgga

SEQ ID NO: 1840 - DNA, 21 bp, Unknown
  Found in multiple species
ctgataaatccaaatgcgaaa

SEQ ID NO: 1841 - DNA, 21 bp, Unknown
  Found in multiple species
ctctaaggtccagacctttcc

SEQ ID NO: 1842 - DNA, 21 bp, Unknown
  Found in multiple species
ctcgagacccccgccttccta

SEQ ID NO: 1843 - DNA, 21 bp, Unknown
  Found in multiple species
ctccaatgtagctcaagatca

SEQ ID NO: 1844 - DNA, 21 bp, Unknown
  Found in multiple species
ctcattatgttacctaccgcc

SEQ ID NO: 1845 - DNA, 21 bp, Unknown
  Found in multiple species
ctcatgagctttcctggtaag

SEQ ID NO: 1846 - DNA, 21 bp, Unknown
  Found in multiple species
ctcatgagatcaaaaaaggga

SEQ ID NO: 1847 - DNA, 21 bp, Unknown
  Found in multiple species
ctcagaaaaattctgataaat

SEQ ID NO: 1848 - DNA, 21 bp, Unknown
  Found in multiple species
ctattcaggaaaggaagaata

SEQ ID NO: 1849 - DNA, 21 bp, Unknown
  Found in multiple species
ctattaggaccctcttcccag

SEQ ID NO: 1850 - DNA, 21 bp, Unknown
  Found in multiple species
ctatggcggttgacagtggat

SEQ ID NO: 1851 - DNA, 21 bp, Unknown
  Found in multiple species
ctatatctgggaagagggtcc

SEQ ID NO: 1852 - DNA, 21 bp, Unknown
  Found in multiple species
ctaggcttggcagtaaagtca

SEQ ID NO: 1853 - DNA, 21 bp, Unknown
  Found in multiple species
ctagcagcaatggcggtaggt

SEQ ID NO: 1854 - DNA, 21 bp, Unknown
  Found in multiple species
ctacggaccttcccttttttg

SEQ ID NO: 1855 - DNA, 21 bp, Unknown
  Found in multiple species
ctaccgccattgctgctaggc

SEQ ID NO: 1856 - DNA, 21 bp, Unknown
  Found in multiple species
ctaccatggagtccgatggct

SEQ ID NO: 1857 - DNA, 21 bp, Unknown
  Found in multiple species
ctaccacccttttgctctaag

SEQ ID NO: 1858 - DNA, 21 bp, Unknown
  Found in multiple species
ctaatcttaccaggaaagctc

SEQ ID NO: 1859 - DNA, 21 bp, Unknown
  Found in multiple species
ctaatattgataagtcgctca

SEQ ID NO: 1860 - DNA, 21 bp, Unknown
  Found in multiple species
ctaaggtccagacctttccaa

SEQ ID NO: 1861 - DNA, 21 bp, Unknown
  Found in multiple species
ctaagggccagactgttggat

SEQ ID NO: 1862 - DNA, 21 bp, Unknown
  Found in multiple species
ctaacagaaaccggtccatcg

SEQ ID NO: 1863 - DNA, 21 bp, Unknown
  Found in multiple species
ctaaaggatccaacagtctgg

SEQ ID NO: 1864 - DNA, 21 bp, Unknown
  Found in multiple species
ctaaacctaagggccagactg

SEQ ID NO: 1865 - DNA, 21 bp, Unknown
  Found in multiple species
cggtttctgttaggaccaaag

SEQ ID NO: 1866 - DNA, 21 bp, Unknown
  Found in multiple species
cggttgacagtggattgaaag

SEQ ID NO: 1867 - DNA, 21 bp, Unknown
  Found in multiple species
cggtccatcgggtgtttgata

SEQ ID NO: 1868 - DNA, 21 bp, Unknown
  Found in multiple species
cggctgcctttcgcatttgga

SEQ ID NO: 1869 - DNA, 21 bp, Unknown
  Found in multiple species
cggcgatgatactaccaccct

SEQ ID NO: 1870 - DNA, 21 bp, Unknown
  Found in multiple species
cggaccttcccttttttgatc

SEQ ID NO: 1871 - DNA, 21 bp, Unknown
  Found in multiple species
cgctttggtcctaacagaaac

SEQ ID NO: 1872 - DNA, 21 bp, Unknown
  Found in multiple species
cgccttcctaaacctaagggc

SEQ ID NO: 1873 - DNA, 21 bp, Unknown
  Found in multiple species
cgccattgctgctaggcttgg

SEQ ID NO: 1874 - DNA, 21 bp, Unknown
  Found in multiple species
cgccatagtaagcacaggatc

SEQ ID NO: 1875 - DNA, 21 bp, Unknown
  Found in multiple species
cgcatttggatttatcagaat

SEQ ID NO: 1876 - DNA, 21 bp, Unknown
  Found in multiple species
cgcaagttcatcttcactctt

SEQ ID NO: 1877 - DNA, 21 bp, Unknown
  Found in multiple species
cgatggaccggtttctgttag

SEQ ID NO: 1878 - DNA, 21 bp, Unknown
  Found in multiple species
cgatgatactaccaccctttt

SEQ ID NO: 1879 - DNA, 21 bp, Unknown
  Found in multiple species
cgagattacggcgcacaaatt

SEQ ID NO: 1880 - DNA, 21 bp, Unknown
  Found in multiple species
cgagacccccgccttcctaaa

SEQ ID NO: 1881 - DNA, 21 bp, Unknown
  Found in multiple species
cgacttatcaatattagaaag

SEQ ID NO: 1882 - DNA, 21 bp, Unknown
  Found in multiple species
cgaagcaggctacttgcaatg

SEQ ID NO: 1883 - DNA, 21 bp, Unknown
  Found in multiple species
ccttttttgatctcatgagct

SEQ ID NO: 1884 - DNA, 21 bp, Unknown
  Found in multiple species
ccttttgctctaaggtccaga

SEQ ID NO: 1885 - DNA, 21 bp, Unknown
  Found in multiple species
cctttggccatactctcactc

SEQ ID NO: 1886 - DNA, 21 bp, Unknown
  Found in multiple species
cctttcgcatttggatttatc

SEQ ID NO: 1887 - DNA, 21 bp, Unknown
  Found in multiple species
cctttcctaaaggatccaaca

SEQ ID NO: 1888 - DNA, 21 bp, Unknown
  Found in multiple species
cctttccaaatgcagctttca

SEQ ID NO: 1889 - DNA, 21 bp, Unknown
  Found in multiple species
ccttgatcttgagctacattg

SEQ ID NO: 1890 - DNA, 21 bp, Unknown
  Found in multiple species
ccttcctaaacctaagggcca

SEQ ID NO: 1891 - DNA, 21 bp, Unknown
  Found in multiple species
ccttcccttttttgatctcat

SEQ ID NO: 1892 - DNA, 21 bp, Unknown
  Found in multiple species
ccttcatacattgcaagtagc

SEQ ID NO: 1893 - DNA, 21 bp, Unknown
  Found in multiple species
ccttaggtttaggaaggcggg

SEQ ID NO: 1894 - DNA, 21 bp, Unknown
  Found in multiple species
ccttagagcaaaagggtggta

SEQ ID NO: 1895 - DNA, 21 bp, Unknown
  Found in multiple species
cctgtgcttactatggcggtt

SEQ ID NO: 1896 - DNA, 21 bp, Unknown
  Found in multiple species
cctggtaagattagggctggt

SEQ ID NO: 1897 - DNA, 21 bp, Unknown
  Found in multiple species
cctcgagacccccgccttcct

SEQ ID NO: 1898 - DNA, 21 bp, Unknown
  Found in multiple species
cctccaatgtagctcaagatc

SEQ ID NO: 1899 - DNA, 21 bp, Unknown
  Found in multiple species
cctagcagcaatggcggtagg

SEQ ID NO: 1900 - DNA, 21 bp, Unknown
  Found in multiple species
cctacggaccttccctttttt

SEQ ID NO: 1901 - DNA, 21 bp, Unknown
  Found in multiple species
cctaccgccattgctgctagg

SEQ ID NO: 1902 - DNA, 21 bp, Unknown
  Found in multiple species
cctaatcttaccaggaaagct

SEQ ID NO: 1903 - DNA, 21 bp, Unknown
  Found in multiple species
cctaagggccagactgttgga

SEQ ID NO: 1904 - DNA, 21 bp, Unknown
  Found in multiple species
cctaacagaaaccggtccatc

SEQ ID NO: 1905 - DNA, 21 bp, Unknown
  Found in multiple species
cctaaaggatccaacagtctg

SEQ ID NO: 1906 - DNA, 21 bp, Unknown
  Found in multiple species
cctaaacctaagggccagact

SEQ ID NO: 1907 - DNA, 21 bp, Unknown
  Found in multiple species
ccggtttctgttaggaccaaa

SEQ ID NO: 1908 - DNA, 21 bp, Unknown
  Found in multiple species
ccggtccatcgggtgtttgat

SEQ ID NO: 1909 - DNA, 21 bp, Unknown
  Found in multiple species
ccggcgatgatactaccaccc

SEQ ID NO: 1910 - DNA, 21 bp, Unknown
  Found in multiple species
ccgctttggtcctaacagaaa

SEQ ID NO: 1911 - DNA, 21 bp, Unknown
  Found in multiple species
ccgccttcctaaacctaaggg

SEQ ID NO: 1912 - DNA, 21 bp, Unknown
  Found in multiple species
ccgccattgctgctaggcttg

SEQ ID NO: 1913 - DNA, 21 bp, Unknown
  Found in multiple species
ccgccatagtaagcacaggat

SEQ ID NO: 1914 - DNA, 21 bp, Unknown
  Found in multiple species
ccgcaagttcatcttcactct

SEQ ID NO: 1915 - DNA, 21 bp, Unknown
  Found in multiple species
ccgatggaccggtttctgtta

SEQ ID NO: 1916 - DNA, 21 bp, Unknown
  Found in multiple species
ccgagattacggcgcacaaat

SEQ ID NO: 1917 - DNA, 21 bp, Unknown
  Found in multiple species
cccttttttgatctcatgagc

SEQ ID NO: 1918 - DNA, 21 bp, Unknown
  Found in multiple species
cccttttgctctaaggtccag

SEQ ID NO: 1919 - DNA, 21 bp, Unknown
  Found in multiple species
cccttaggtttaggaaggcgg

SEQ ID NO: 1920 - DNA, 21 bp, Unknown
  Found in multiple species
ccctaatcttaccaggaaagc

SEQ ID NO: 1921 - DNA, 21 bp, Unknown
  Found in multiple species
cccgccttcctaaacctaagg

SEQ ID NO: 1922 - DNA, 21 bp, Unknown
  Found in multiple species
cccgatggaccggtttctgtt

SEQ ID NO: 1923 - DNA, 21 bp, Unknown
  Found in multiple species
ccccgccttcctaaacctaag

SEQ ID NO: 1924 - DNA, 21 bp, Unknown
  Found in multiple species
cccccgccttcctaaacctaa

SEQ ID NO: 1925 - DNA, 21 bp, Unknown
  Found in multiple species
cccagatatagccatcggact

SEQ ID NO: 1926 - DNA, 21 bp, Unknown
  Found in multiple species
ccattgctgctaggcttggca

SEQ ID NO: 1927 - DNA, 21 bp, Unknown
  Found in multiple species
ccattgagcgacttatcaata

SEQ ID NO: 1928 - DNA, 21 bp, Unknown
  Found in multiple species
ccatggagtccgatggctata

SEQ ID NO: 1929 - DNA, 21 bp, Unknown
  Found in multiple species
ccatactctcactcccagaac

SEQ ID NO: 1930 - DNA, 21 bp, Unknown
  Found in multiple species
ccagtcgcagcagtgtccctt

SEQ ID NO: 1931 - DNA, 21 bp, Unknown
  Found in multiple species
ccaggaaagctcatgagatca

SEQ ID NO: 1932 - DNA, 21 bp, Unknown
  Found in multiple species
ccagccctaatcttaccagga

SEQ ID NO: 1933 - DNA, 21 bp, Unknown
  Found in multiple species
ccagatatagccatcggactc

SEQ ID NO: 1934 - DNA, 21 bp, Unknown
  Found in multiple species
ccagactgttggatcctttag

SEQ ID NO: 1935 - DNA, 21 bp, Unknown
  Found in multiple species
ccagacctttccaaatgcagc

SEQ ID NO: 1936 - DNA, 21 bp, Unknown
  Found in multiple species
ccactgtcaaccgccatagta

SEQ ID NO: 1937 - DNA, 21 bp, Unknown
  Found in multiple species
ccacccttttgctctaaggtc

SEQ ID NO: 1938 - DNA, 21 bp, Unknown
  Found in multiple species
ccaatgtagctcaagatcaag

SEQ ID NO: 1939 - DNA, 21 bp, Unknown
  Found in multiple species
ccaagcctagcagcaatggcg

SEQ ID NO: 1940 - DNA, 21 bp, Unknown
  Found in multiple species
ccaagaccagccctaatctta

SEQ ID NO: 1941 - DNA, 21 bp, Unknown
  Found in multiple species
ccaacagtctggcccttaggt

SEQ ID NO: 1942 - DNA, 21 bp, Unknown
  Found in multiple species
ccaaatgcagctttcatactc

SEQ ID NO: 1943 - DNA, 21 bp, Unknown
  Found in multiple species
ccaaagcggttgtcatgactg

SEQ ID NO: 1944 - DNA, 21 bp, Unknown
  Found in multiple species
catttggatttatcagaattt

SEQ ID NO: 1945 - DNA, 21 bp, Unknown
  Found in multiple species
catttggaaaggtctggacct

SEQ ID NO: 1946 - DNA, 21 bp, Unknown
  Found in multiple species
cattgctgctaggcttggcag

SEQ ID NO: 1947 - DNA, 21 bp, Unknown
  Found in multiple species
cattgcaagtagcctgcttcg

SEQ ID NO: 1948 - DNA, 21 bp, Unknown
  Found in multiple species
cattgagcgacttatcaatat

SEQ ID NO: 1949 - DNA, 21 bp, Unknown
  Found in multiple species
cattatgttacctaccgccat

SEQ ID NO: 1950 - DNA, 21 bp, Unknown
  Found in multiple species
catggagtccgatggctatat

SEQ ID NO: 1951 - DNA, 21 bp, Unknown
  Found in multiple species
catgagctttcctggtaagat

SEQ ID NO: 1952 - DNA, 21 bp, Unknown
  Found in multiple species
catgagatcaaaaaagggaag

SEQ ID NO: 1953 - DNA, 21 bp, Unknown
  Found in multiple species
catgacaaccgctttggtcct

SEQ ID NO: 1954 - DNA, 21 bp, Unknown
  Found in multiple species
catcttcactcttttgtaata

SEQ ID NO: 1955 - DNA, 21 bp, Unknown
  Found in multiple species
catacattgcaagtagcctgc

SEQ ID NO: 1956 - DNA, 21 bp, Unknown
  Found in multiple species
cagtctggcccttaggtttag

SEQ ID NO: 1957 - DNA, 21 bp, Unknown
  Found in multiple species
cagtcatgacaaccgctttgg

SEQ ID NO: 1958 - DNA, 21 bp, Unknown
  Found in multiple species
caggctacttgcaatgtatga

SEQ ID NO: 1959 - DNA, 21 bp, Unknown
  Found in multiple species
caggccttaatttaccattcc

SEQ ID NO: 1960 - DNA, 21 bp, Unknown
  Found in multiple species
caggaaaggaagaataatcct

SEQ ID NO: 1961 - DNA, 21 bp, Unknown
  Found in multiple species
caggaaagctcatgagatcaa

SEQ ID NO: 1962 - DNA, 21 bp, Unknown
  Found in multiple species
cagctttcatactcaactttg

SEQ ID NO: 1963 - DNA, 21 bp, Unknown
  Found in multiple species
cagccctaatcttaccaggaa

SEQ ID NO: 1964 - DNA, 21 bp, Unknown
  Found in multiple species
cagcaatggcggtaggtaaca

SEQ ID NO: 1965 - DNA, 21 bp, Unknown
  Found in multiple species
cagatatagccatcggactcc

SEQ ID NO: 1966 - DNA, 21 bp, Unknown
  Found in multiple species
cagactgttggatcctttagg

SEQ ID NO: 1967 - DNA, 21 bp, Unknown
  Found in multiple species
cagacctttccaaatgcagct

SEQ ID NO: 1968 - DNA, 21 bp, Unknown
  Found in multiple species
cagaatttttctgagatcctt

SEQ ID NO: 1969 - DNA, 21 bp, Unknown
  Found in multiple species
cagaaaccggtccatcgggtg

SEQ ID NO: 1970 - DNA, 21 bp, Unknown
  Found in multiple species
cagaaaaattctgataaatcc

SEQ ID NO: 1971 - DNA, 21 bp, Unknown
  Found in multiple species
cactttctaatattgataagt

SEQ ID NO: 1972 - DNA, 21 bp, Unknown
  Found in multiple species
cactgtcaaccgccatagtaa

SEQ ID NO: 1973 - DNA, 21 bp, Unknown
  Found in multiple species
cacctccaatgtagctcaaga

SEQ ID NO: 1974 - DNA, 21 bp, Unknown
  Found in multiple species
cacccttttgctctaaggtcc

SEQ ID NO: 1975 - DNA, 21 bp, Unknown
  Found in multiple species
cacccgatggaccggtttctg

SEQ ID NO: 1976 - DNA, 21 bp, Unknown
  Found in multiple species
caccattgagcgacttatcaa

SEQ ID NO: 1977 - DNA, 21 bp, Unknown
  Found in multiple species
caccaagaccagccctaatct

SEQ ID NO: 1978 - DNA, 21 bp, Unknown
  Found in multiple species
caatgtagctcaagatcaagg

SEQ ID NO: 1979 - DNA, 21 bp, Unknown
  Found in multiple species
caatggcggtaggtaacataa

SEQ ID NO: 1980 - DNA, 21 bp, Unknown
  Found in multiple species
caatccactgtcaaccgccat

SEQ ID NO: 1981 - DNA, 21 bp, Unknown
  Found in multiple species
caagttcatcttcactctttt

SEQ ID NO: 1982 - DNA, 21 bp, Unknown
  Found in multiple species
caagcctagcagcaatggcgg

SEQ ID NO: 1983 - DNA, 21 bp, Unknown
  Found in multiple species
caagaccagccctaatcttac

SEQ ID NO: 1984 - DNA, 21 bp, Unknown
  Found in multiple species
caaccgctttggtcctaacag

SEQ ID NO: 1985 - DNA, 21 bp, Unknown
  Found in multiple species
caaccgccatagtaagcacag

SEQ ID NO: 1986 - DNA, 21 bp, Unknown
  Found in multiple species
caacagtctggcccttaggtt

SEQ ID NO: 1987 - DNA, 21 bp, Unknown
  Found in multiple species
caaatgcagctttcatactca

SEQ ID NO: 1988 - DNA, 21 bp, Unknown
  Found in multiple species
caaagttgagtatgaaagctg

SEQ ID NO: 1989 - DNA, 21 bp, Unknown
  Found in multiple species
caaagcggttgtcatgactgt

SEQ ID NO: 1990 - DNA, 21 bp, Unknown
  Found in multiple species
caaacacccgatggaccggtt

SEQ ID NO: 1991 - DNA, 21 bp, Unknown
  Found in multiple species
caaaagggtggtagtatcatc

SEQ ID NO: 1992 - DNA, 21 bp, Unknown
  Found in multiple species
caaaagagtgaagatgaactt

SEQ ID NO: 1993 - DNA, 21 bp, Unknown
  Found in multiple species
caaaaaagggaaggtccgtag

SEQ ID NO: 1994 - DNA, 21 bp, Unknown
  Found in multiple species
atttgtgcgccgtaatctcgg

SEQ ID NO: 1995 - DNA, 21 bp, Unknown
  Found in multiple species
atttggatttatcagaatttt

SEQ ID NO: 1996 - DNA, 21 bp, Unknown
  Found in multiple species
atttggaaaggtctggacctt

SEQ ID NO: 1997 - DNA, 21 bp, Unknown
  Found in multiple species
atttatcagaatttttctgag

SEQ ID NO: 1998 - DNA, 21 bp, Unknown
  Found in multiple species
attgctgctaggcttggcagt

SEQ ID NO: 1999 - DNA, 21 bp, Unknown
  Found in multiple species
attgcctttggccatactctc

SEQ ID NO: 2000 - DNA, 21 bp, Unknown
  Found in multiple species
attgcaagtagcctgcttcgt

SEQ ID NO: 2001 - DNA, 21 bp, Unknown
  Found in multiple species
attgataagtcgctcaatggt

SEQ ID NO: 2002 - DNA, 21 bp, Unknown
  Found in multiple species
attgagcgacttatcaatatt

SEQ ID NO: 2003 - DNA, 21 bp, Unknown
  Found in multiple species
attctgataaatccaaatgcg

SEQ ID NO: 2004 - DNA, 21 bp, Unknown
  Found in multiple species
attcaggaaaggaagaataat

SEQ ID NO: 2005 - DNA, 21 bp, Unknown
  Found in multiple species
attcaccattgagcgacttat

SEQ ID NO: 2006 - DNA, 21 bp, Unknown
  Found in multiple species
attattcttcctttcctgaat

SEQ ID NO: 2007 - DNA, 21 bp, Unknown
  Found in multiple species
attatgttacctaccgccatt

SEQ ID NO: 2008 - DNA, 21 bp, Unknown
  Found in multiple species
attaggaccctcttcccagat

SEQ ID NO: 2009 - DNA, 21 bp, Unknown
  Found in multiple species
attacggcgcacaaattcttc

SEQ ID NO: 2010 - DNA, 21 bp, Unknown
  Found in multiple species
attacaaaagagtgaagatga

SEQ ID NO: 2011 - DNA, 21 bp, Unknown
  Found in multiple species
atgttacctaccgccattgct

SEQ ID NO: 2012 - DNA, 21 bp, Unknown
  Found in multiple species
atgtagctcaagatcaaggtc

SEQ ID NO: 2013 - DNA, 21 bp, Unknown
  Found in multiple species
atggtaaattaaggcctgttc

SEQ ID NO: 2014 - DNA, 21 bp, Unknown
  Found in multiple species
atggcggttgacagtggattg

SEQ ID NO: 2015 - DNA, 21 bp, Unknown
  Found in multiple species
atggcggtaggtaacataatg

SEQ ID NO: 2016 - DNA, 21 bp, Unknown
  Found in multiple species
atggagtccgatggctatatc

SEQ ID NO: 2017 - DNA, 21 bp, Unknown
  Found in multiple species
atggaccggtttctgttagga

SEQ ID NO: 2018 - DNA, 21 bp, Unknown
  Found in multiple species
atgcagctttcatactcaact

SEQ ID NO: 2019 - DNA, 21 bp, Unknown
  Found in multiple species
atgatactaccacccttttgc

SEQ ID NO: 2020 - DNA, 21 bp, Unknown
  Found in multiple species
atgagctttcctggtaagatt

SEQ ID NO: 2021 - DNA, 21 bp, Unknown
  Found in multiple species
atgagatcaaaaaagggaagg

SEQ ID NO: 2022 - DNA, 21 bp, Unknown
  Found in multiple species
atgacaaccgctttggtccta

SEQ ID NO: 2023 - DNA, 21 bp, Unknown
  Found in multiple species
atgaaagctgcatttggaaag

SEQ ID NO: 2024 - DNA, 21 bp, Unknown
  Found in multiple species
atcttgagctacattggaggt

SEQ ID NO: 2025 - DNA, 21 bp, Unknown
  Found in multiple species
atcttcactcttttgtaatat

SEQ ID NO: 2026 - DNA, 21 bp, Unknown
  Found in multiple species
atcttaccaggaaagctcatg

SEQ ID NO: 2027 - DNA, 21 bp, Unknown
  Found in multiple species
atctgggaagagggtcctaat

SEQ ID NO: 2028 - DNA, 21 bp, Unknown
  Found in multiple species
atctcatgagctttcctggta

SEQ ID NO: 2029 - DNA, 21 bp, Unknown
  Found in multiple species
atctcagaaaaattctgataa

SEQ ID NO: 2030 - DNA, 21 bp, Unknown
  Found in multiple species
atcctgtgcttactatggcgg

SEQ ID NO: 2031 - DNA, 21 bp, Unknown
  Found in multiple species
atccactgtcaaccgccatag

SEQ ID NO: 2032 - DNA, 21 bp, Unknown
  Found in multiple species
atccaacagtctggcccttag

SEQ ID NO: 2033 - DNA, 21 bp, Unknown
  Found in multiple species
atccaaatgcgaaaggcagcc

SEQ ID NO: 2034 - DNA, 21 bp, Unknown
  Found in multiple species
atcatcgccggtacactcaaa

SEQ ID NO: 2035 - DNA, 21 bp, Unknown
  Found in multiple species
atcagaatttttctgagatcc

SEQ ID NO: 2036 - DNA, 21 bp, Unknown
  Found in multiple species
atcaatattagaaagtgtcca

SEQ ID NO: 2037 - DNA, 21 bp, Unknown
  Found in multiple species
atcaaacacccgatggaccgg

SEQ ID NO: 2038 - DNA, 21 bp, Unknown
  Found in multiple species
atcaaaaaagggaaggtccgt

SEQ ID NO: 2039 - DNA, 21 bp, Unknown
  Found in multiple species
atattgataagtcgctcaatg

SEQ ID NO: 2040 - DNA, 21 bp, Unknown
  Found in multiple species
atattacaaaagagtgaagat

SEQ ID NO: 2041 - DNA, 21 bp, Unknown
  Found in multiple species
atatctgggaagagggtccta

SEQ ID NO: 2042 - DNA, 21 bp, Unknown
  Found in multiple species
atatagccatcggactccatg

SEQ ID NO: 2043 - DNA, 21 bp, Unknown
  Found in multiple species
atagtttgactttactgccaa

SEQ ID NO: 2044 - DNA, 21 bp, Unknown
  Found in multiple species
atagccatcggactccatggt

SEQ ID NO: 2045 - DNA, 21 bp, Unknown
  Found in multiple species
atactaccacccttttgctct

SEQ ID NO: 2046 - DNA, 21 bp, Unknown
  Found in multiple species
atacattgcaagtagcctgct

SEQ ID NO: 2047 - DNA, 21 bp, Unknown
  Found in multiple species
ataagtcgctcaatggtgaat

SEQ ID NO: 2048 - DNA, 21 bp, Unknown
  Found in multiple species
ataaatccaaatgcgaaaggc

SEQ ID NO: 2049 - DNA, 21 bp, Unknown
  Found in multiple species
agtttgactttactgccaagc

SEQ ID NO: 2050 - DNA, 21 bp, Unknown
  Found in multiple species
agttgagtatgaaagctgcat

SEQ ID NO: 2051 - DNA, 21 bp, Unknown
  Found in multiple species
agttcatcttcactcttttgt

SEQ ID NO: 2052 - DNA, 21 bp, Unknown
  Found in multiple species
agtgtaccggcgatgatacta

SEQ ID NO: 2053 - DNA, 21 bp, Unknown
  Found in multiple species
agtgagagtatggccaaaggc

SEQ ID NO: 2054 - DNA, 21 bp, Unknown
  Found in multiple species
agtctggcccttaggtttagg

SEQ ID NO: 2055 - DNA, 21 bp, Unknown
  Found in multiple species
agtcgctcaatggtgaataca

SEQ ID NO: 2056 - DNA, 21 bp, Unknown
  Found in multiple species
agtccgatggctatatctggg

SEQ ID NO: 2057 - DNA, 21 bp, Unknown
  Found in multiple species
agtcatgacaaccgctttggt

SEQ ID NO: 2058 - DNA, 21 bp, Unknown
  Found in multiple species
agtatgaaagctgcatttgga

SEQ ID NO: 2059 - DNA, 21 bp, Unknown
  Found in multiple species
agtatcatcgccggtacactc

SEQ ID NO: 2060 - DNA, 21 bp, Unknown
  Found in multiple species
aggtttaggaaggcgggggtc

SEQ ID NO: 2061 - DNA, 21 bp, Unknown
  Found in multiple species
aggtctggaccttagagcaaa

SEQ ID NO: 2062 - DNA, 21 bp, Unknown
  Found in multiple species
aggtccagacctttccaaatg

SEQ ID NO: 2063 - DNA, 21 bp, Unknown
  Found in multiple species
agggttggaaactattaggac

SEQ ID NO: 2064 - DNA, 21 bp, Unknown
  Found in multiple species
agggtggtagtatcatcgccg

SEQ ID NO: 2065 - DNA, 21 bp, Unknown
  Found in multiple species
agggtcctaatagtttccaac

SEQ ID NO: 2066 - DNA, 21 bp, Unknown
  Found in multiple species
agggccagactgttggatcct

SEQ ID NO: 2067 - DNA, 21 bp, Unknown
  Found in multiple species
aggcttggcagtaaagtcaaa

SEQ ID NO: 2068 - DNA, 21 bp, Unknown
  Found in multiple species
aggctacttgcaatgtatgaa

SEQ ID NO: 2069 - DNA, 21 bp, Unknown
  Found in multiple species
aggccttaatttaccattcca

SEQ ID NO: 2070 - DNA, 21 bp, Unknown
  Found in multiple species
aggattattcttcctttcctg

SEQ ID NO: 2071 - DNA, 21 bp, Unknown
  Found in multiple species
aggatctcagaaaaattctga

SEQ ID NO: 2072 - DNA, 21 bp, Unknown
  Found in multiple species
aggatccaacagtctggccct

SEQ ID NO: 2073 - DNA, 21 bp, Unknown
  Found in multiple species
aggaccttgatcttgagctac

SEQ ID NO: 2074 - DNA, 21 bp, Unknown
  Found in multiple species
aggaccctcttcccagatata

SEQ ID NO: 2075 - DNA, 21 bp, Unknown
  Found in multiple species
aggaccaaagcggttgtcatg

SEQ ID NO: 2076 - DNA, 21 bp, Unknown
  Found in multiple species
aggaaggcgggggtctcgagg

SEQ ID NO: 2077 - DNA, 21 bp, Unknown
  Found in multiple species
aggaacaggccttaatttacc

SEQ ID NO: 2078 - DNA, 21 bp, Unknown
  Found in multiple species
aggaaaggaagaataatcctc

SEQ ID NO: 2079 - DNA, 21 bp, Unknown
  Found in multiple species
aggaaagctcatgagatcaaa

SEQ ID NO: 2080 - DNA, 21 bp, Unknown
  Found in multiple species
agctttcctggtaagattagg

SEQ ID NO: 2081 - DNA, 21 bp, Unknown
  Found in multiple species
agctgcatttggaaaggtctg

SEQ ID NO: 2082 - DNA, 21 bp, Unknown
  Found in multiple species
agctcatgagatcaaaaaagg

SEQ ID NO: 2083 - DNA, 21 bp, Unknown
  Found in multiple species
agctacattggaggtgctaca

SEQ ID NO: 2084 - DNA, 21 bp, Unknown
  Found in multiple species
agcgacttatcaatattagaa

SEQ ID NO: 2085 - DNA, 21 bp, Unknown
  Found in multiple species
agcctagcagcaatggcggta

SEQ ID NO: 2086 - DNA, 21 bp, Unknown
  Found in multiple species
agccctaatcttaccaggaaa

SEQ ID NO: 2087 - DNA, 21 bp, Unknown
  Found in multiple species
agccatcggactccatggtag

SEQ ID NO: 2088 - DNA, 21 bp, Unknown
  Found in multiple species
agcaggctacttgcaatgtat

SEQ ID NO: 2089 - DNA, 21 bp, Unknown
  Found in multiple species
agcagcaatggcggtaggtaa

SEQ ID NO: 2090 - DNA, 21 bp, Unknown
  Found in multiple species
agcacctccaatgtagctcaa

SEQ ID NO: 2091 - DNA, 21 bp, Unknown
  Found in multiple species
agcaatggcggtaggtaacat

SEQ ID NO: 2092 - DNA, 21 bp, Unknown
  Found in multiple species
agcaaaagggtggtagtatca

SEQ ID NO: 2093 - DNA, 21 bp, Unknown
  Found in multiple species
agattagggctggtcttggtg

SEQ ID NO: 2094 - DNA, 21 bp, Unknown
  Found in multiple species
agattacggcgcacaaattct

SEQ ID NO: 2095 - DNA, 21 bp, Unknown
  Found in multiple species
agatcaaaaaagggaaggtcc

SEQ ID NO: 2096 - DNA, 21 bp, Unknown
  Found in multiple species
agatatagccatcggactcca

SEQ ID NO: 2097 - DNA, 21 bp, Unknown
  Found in multiple species
agagtgaagatgaacttgcgg

SEQ ID NO: 2098 - DNA, 21 bp, Unknown
  Found in multiple species
agagggtcctaatagtttcca

SEQ ID NO: 2099 - DNA, 21 bp, Unknown
  Found in multiple species
agagcaaaagggtggtagtat

SEQ ID NO: 2100 - DNA, 21 bp, Unknown
  Found in multiple species
agactgttggatcctttagga

SEQ ID NO: 2101 - DNA, 21 bp, Unknown
  Found in multiple species
agacctttccaaatgcagctt

SEQ ID NO: 2102 - DNA, 21 bp, Unknown
  Found in multiple species
agacccccgccttcctaaacc

SEQ ID NO: 2103 - DNA, 21 bp, Unknown
  Found in multiple species
agaccagccctaatcttacca

SEQ ID NO: 2104 - DNA, 21 bp, Unknown
  Found in multiple species
agaatttgtgcgccgtaatct

SEQ ID NO: 2105 - DNA, 21 bp, Unknown
  Found in multiple species
agaaaccggtccatcgggtgt

SEQ ID NO: 2106 - DNA, 21 bp, Unknown
  Found in multiple species
agaaaaattctgataaatcca

SEQ ID NO: 2107 - DNA, 21 bp, Unknown
  Found in multiple species
actttctaatattgataagtc

SEQ ID NO: 2108 - DNA, 21 bp, Unknown
  Found in multiple species
actttactgccaagcctagca

SEQ ID NO: 2109 - DNA, 21 bp, Unknown
  Found in multiple species
acttatcaatattagaaagtg

SEQ ID NO: 2110 - DNA, 21 bp, Unknown
  Found in multiple species
actgttggatcctttaggaaa

SEQ ID NO: 2111 - DNA, 21 bp, Unknown
  Found in multiple species
actgtcaaccgccatagtaag

SEQ ID NO: 2112 - DNA, 21 bp, Unknown
  Found in multiple species
actgccaagcctagcagcaat

SEQ ID NO: 2113 - DNA, 21 bp, Unknown
  Found in multiple species
actattaggaccctcttccca

SEQ ID NO: 2114 - DNA, 21 bp, Unknown
  Found in multiple species
actatggcggttgacagtgga

SEQ ID NO: 2115 - DNA, 21 bp, Unknown
  Found in multiple species
actaccatggagtccgatggc

SEQ ID NO: 2116 - DNA, 21 bp, Unknown
  Found in multiple species
actaccacccttttgctctaa

SEQ ID NO: 2117 - DNA, 21 bp, Unknown
  Found in multiple species
acggcgcacaaattcttcaac

SEQ ID NO: 2118 - DNA, 21 bp, Unknown
  Found in multiple species
acggaccttcccttttttgat

SEQ ID NO: 2119 - DNA, 21 bp, Unknown
  Found in multiple species
acgaagcaggctacttgcaat

SEQ ID NO: 2120 - DNA, 21 bp, Unknown
  Found in multiple species
acctttccaaatgcagctttc

SEQ ID NO: 2121 - DNA, 21 bp, Unknown
  Found in multiple species
accttgatcttgagctacatt

SEQ ID NO: 2122 - DNA, 21 bp, Unknown
  Found in multiple species
accttcccttttttgatctca

SEQ ID NO: 2123 - DNA, 21 bp, Unknown
  Found in multiple species
accttagagcaaaagggtggt

SEQ ID NO: 2124 - DNA, 21 bp, Unknown
  Found in multiple species
acctccaatgtagctcaagat

SEQ ID NO: 2125 - DNA, 21 bp, Unknown
  Found in multiple species
acctaccgccattgctgctag

SEQ ID NO: 2126 - DNA, 21 bp, Unknown
  Found in multiple species
acctaagggccagactgttgg

SEQ ID NO: 2127 - DNA, 21 bp, Unknown
  Found in multiple species
accggtttctgttaggaccaa

SEQ ID NO: 2128 - DNA, 21 bp, Unknown
  Found in multiple species
accggtccatcgggtgtttga

SEQ ID NO: 2129 - DNA, 21 bp, Unknown
  Found in multiple species
accggcgatgatactaccacc

SEQ ID NO: 2130 - DNA, 21 bp, Unknown
  Found in multiple species
accgctttggtcctaacagaa

SEQ ID NO: 2131 - DNA, 21 bp, Unknown
  Found in multiple species
accgccattgctgctaggctt

SEQ ID NO: 2132 - DNA, 21 bp, Unknown
  Found in multiple species
accgccatagtaagcacagga

SEQ ID NO: 2133 - DNA, 21 bp, Unknown
  Found in multiple species
acccttttgctctaaggtcca

SEQ ID NO: 2134 - DNA, 21 bp, Unknown
  Found in multiple species
accctcttcccagatatagcc

SEQ ID NO: 2135 - DNA, 21 bp, Unknown
  Found in multiple species
acccgatggaccggtttctgt

SEQ ID NO: 2136 - DNA, 21 bp, Unknown
  Found in multiple species
acccccgccttcctaaaccta

SEQ ID NO: 2137 - DNA, 21 bp, Unknown
  Found in multiple species
accattgagcgacttatcaat

SEQ ID NO: 2138 - DNA, 21 bp, Unknown
  Found in multiple species
accatggagtccgatggctat

SEQ ID NO: 2139 - DNA, 21 bp, Unknown
  Found in multiple species
accaggaaagctcatgagatc

SEQ ID NO: 2140 - DNA, 21 bp, Unknown
  Found in multiple species
accagccctaatcttaccagg

SEQ ID NO: 2141 - DNA, 21 bp, Unknown
  Found in multiple species
accacccttttgctctaaggt

SEQ ID NO: 2142 - DNA, 21 bp, Unknown
  Found in multiple species
accaagaccagccctaatctt

SEQ ID NO: 2143 - DNA, 21 bp, Unknown
  Found in multiple species
accaaagcggttgtcatgact

SEQ ID NO: 2144 - DNA, 21 bp, Unknown
  Found in multiple species
acattgcaagtagcctgcttc

SEQ ID NO: 2145 - DNA, 21 bp, Unknown
  Found in multiple species
acagtctggcccttaggttta

SEQ ID NO: 2146 - DNA, 21 bp, Unknown
  Found in multiple species
acagtcatgacaaccgctttg

SEQ ID NO: 2147 - DNA, 21 bp, Unknown
  Found in multiple species
acaggccttaatttaccattc

SEQ ID NO: 2148 - DNA, 21 bp, Unknown
  Found in multiple species
acagaaaccggtccatcgggt

SEQ ID NO: 2149 - DNA, 21 bp, Unknown
  Found in multiple species
acactttctaatattgataag

SEQ ID NO: 2150 - DNA, 21 bp, Unknown
  Found in multiple species
acacccgatggaccggtttct

SEQ ID NO: 2151 - DNA, 21 bp, Unknown
  Found in multiple species
acaaccgctttggtcctaaca

SEQ ID NO: 2152 - DNA, 21 bp, Unknown
  Found in multiple species
acaaaagagtgaagatgaact

SEQ ID NO: 2153 - DNA, 21 bp, Unknown
  Found in multiple species
aatttgtgcgccgtaatctcg

SEQ ID NO: 2154 - DNA, 21 bp, Unknown
  Found in multiple species
aattctgataaatccaaatgc

SEQ ID NO: 2155 - DNA, 21 bp, Unknown
  Found in multiple species
aatgtagctcaagatcaaggt

SEQ ID NO: 2156 - DNA, 21 bp, Unknown
  Found in multiple species
aatggtaaattaaggcctgtt

SEQ ID NO: 2157 - DNA, 21 bp, Unknown
  Found in multiple species
aatggcggtaggtaacataat

SEQ ID NO: 2158 - DNA, 21 bp, Unknown
  Found in multiple species
aatgcagctttcatactcaac

SEQ ID NO: 2159 - DNA, 21 bp, Unknown
  Found in multiple species
aatcttaccaggaaagctcat

SEQ ID NO: 2160 - DNA, 21 bp, Unknown
  Found in multiple species
aatccactgtcaaccgccata

SEQ ID NO: 2161 - DNA, 21 bp, Unknown
  Found in multiple species
aatccaaatgcgaaaggcagc

SEQ ID NO: 2162 - DNA, 21 bp, Unknown
  Found in multiple species
aatattgataagtcgctcaat

SEQ ID NO: 2163 - DNA, 21 bp, Unknown
  Found in multiple species
aagttgagtatgaaagctgca

SEQ ID NO: 2164 - DNA, 21 bp, Unknown
  Found in multiple species
aagttcatcttcactcttttg

SEQ ID NO: 2165 - DNA, 21 bp, Unknown
  Found in multiple species
aagtcgctcaatggtgaatac

SEQ ID NO: 2166 - DNA, 21 bp, Unknown
  Found in multiple species
aaggtctggaccttagagcaa

SEQ ID NO: 2167 - DNA, 21 bp, Unknown
  Found in multiple species
aaggtccagacctttccaaat

SEQ ID NO: 2168 - DNA, 21 bp, Unknown
  Found in multiple species
aagggtggtagtatcatcgcc

SEQ ID NO: 2169 - DNA, 21 bp, Unknown
  Found in multiple species
aagggccagactgttggatcc

SEQ ID NO: 2170 - DNA, 21 bp, Unknown
  Found in multiple species
aagggacactgctgcgactgg

SEQ ID NO: 2171 - DNA, 21 bp, Unknown
  Found in multiple species
aaggatctcagaaaaattctg

SEQ ID NO: 2172 - DNA, 21 bp, Unknown
  Found in multiple species
aaggatccaacagtctggccc

SEQ ID NO: 2173 - DNA, 21 bp, Unknown
  Found in multiple species
aaggaagaataatcctccacc

SEQ ID NO: 2174 - DNA, 21 bp, Unknown
  Found in multiple species
aaggaacaggccttaatttac

SEQ ID NO: 2175 - DNA, 21 bp, Unknown
  Found in multiple species
aagctgcatttggaaaggtct

SEQ ID NO: 2176 - DNA, 21 bp, Unknown
  Found in multiple species
aagctcatgagatcaaaaaag

SEQ ID NO: 2177 - DNA, 21 bp, Unknown
  Found in multiple species
aagcctagcagcaatggcggt

SEQ ID NO: 2178 - DNA, 21 bp, Unknown
  Found in multiple species
aagcaggctacttgcaatgta

SEQ ID NO: 2179 - DNA, 21 bp, Unknown
  Found in multiple species
aagattagggctggtcttggt

SEQ ID NO: 2180 - DNA, 21 bp, Unknown
  Found in multiple species
aagagtgaagatgaacttgcg

SEQ ID NO: 2181 - DNA, 21 bp, Unknown
  Found in multiple species
aagagggtcctaatagtttcc

SEQ ID NO: 2182 - DNA, 21 bp, Unknown
  Found in multiple species
aagagaatctgcagcaacatc

SEQ ID NO: 2183 - DNA, 21 bp, Unknown
  Found in multiple species
aagaccagccctaatcttacc

SEQ ID NO: 2184 - DNA, 21 bp, Unknown
  Found in multiple species
aagaatttgtgcgccgtaatc

SEQ ID NO: 2185 - DNA, 21 bp, Unknown
  Found in multiple species
aactattaggaccctcttccc

SEQ ID NO: 2186 - DNA, 21 bp, Unknown
  Found in multiple species
aacctaagggccagactgttg

SEQ ID NO: 2187 - DNA, 21 bp, Unknown
  Found in multiple species
aaccggtccatcgggtgtttg

SEQ ID NO: 2188 - DNA, 21 bp, Unknown
  Found in multiple species
aaccgctttggtcctaacaga

SEQ ID NO: 2189 - DNA, 21 bp, Unknown
  Found in multiple species
aaccgccatagtaagcacagg

SEQ ID NO: 2190 - DNA, 21 bp, Unknown
  Found in multiple species
aacagtctggcccttaggttt

SEQ ID NO: 2191 - DNA, 21 bp, Unknown
  Found in multiple species
aacaggccttaatttaccatt

SEQ ID NO: 2192 - DNA, 21 bp, Unknown
  Found in multiple species
aacagaaaccggtccatcggg

SEQ ID NO: 2193 - DNA, 21 bp, Unknown
  Found in multiple species
aacacccgatggaccggtttc

SEQ ID NO: 2194 - DNA, 21 bp, Unknown
  Found in multiple species
aaattctgataaatccaaatg

SEQ ID NO: 2195 - DNA, 21 bp, Unknown
  Found in multiple species
aaatgcagctttcatactcaa

SEQ ID NO: 2196 - DNA, 21 bp, Unknown
  Found in multiple species
aaatccaaatgcgaaaggcag

SEQ ID NO: 2197 - DNA, 21 bp, Unknown
  Found in multiple species
aaagttgagtatgaaagctgc

SEQ ID NO: 2198 - DNA, 21 bp, Unknown
  Found in multiple species
aaaggtctggaccttagagca

SEQ ID NO: 2199 - DNA, 21 bp, Unknown
  Found in multiple species
aaagggtggtagtatcatcgc

SEQ ID NO: 2200 - DNA, 21 bp, Unknown
  Found in multiple species
aaaggatccaacagtctggcc

SEQ ID NO: 2201 - DNA, 21 bp, Unknown
  Found in multiple species
aaaggaagaataatcctccac

SEQ ID NO: 2202 - DNA, 21 bp, Unknown
  Found in multiple species
aaagctgcatttggaaaggtc

SEQ ID NO: 2203 - DNA, 21 bp, Unknown
  Found in multiple species
aaagctcatgagatcaaaaaa

SEQ ID NO: 2204 - DNA, 21 bp, Unknown
  Found in multiple species
aaagagtgaagatgaacttgc

SEQ ID NO: 2205 - DNA, 21 bp, Unknown
  Found in multiple species
aaactattaggaccctcttcc

SEQ ID NO: 2206 - DNA, 21 bp, Unknown
  Found in multiple species
aaacctaagggccagactgtt

SEQ ID NO: 2207 - DNA, 21 bp, Unknown
  Found in multiple species
aaaccggtccatcgggtgttt

SEQ ID NO: 2208 - DNA, 21 bp, Unknown
  Found in multiple species
aaacacccgatggaccggttt

SEQ ID NO: 2209 - DNA, 21 bp, Unknown
  Found in multiple species
aaaattctgataaatccaaat

SEQ ID NO: 2210 - DNA, 21 bp, Unknown
  Found in multiple species
aaaagggtggtagtatcatcg

SEQ ID NO: 2211 - DNA, 21 bp, Unknown
  Found in multiple species
aaaagagtgaagatgaacttg

SEQ ID NO: 2212 - DNA, 21 bp, Unknown
  Found in multiple species
aaaaattctgataaatccaaa

SEQ ID NO: 2213 - DNA, 21 bp, Unknown
  Found in multiple species
aaaaaagggaaggtccgtagg

SEQ ID NO: 2214 - DNA, 22 bp, Amaranthus palmeri
gtgatattacctccaacacgat

SEQ ID NO: 2215 - DNA, 21 bp, Amaranthus palmeri
atagtaagcacaggatcggag

SEQ ID NO: 2216 - DNA, 21 bp, Amaranthus palmeri
ctttcaatccactgtcaaccg

SEQ ID NO: 2217 - DNA, 21 bp, Amaranthus palmeri
ctttcaatccactgtcaaccg

SEQ ID NO: 2218 - DNA, 22 bp, Amaranthus palmeri
atcaagcgttcgaagacctcat

SEQ ID NO: 2219 - DNA, 21 bp, Amaranthus palmeri
cagcaatggcggtaggtaaca

SEQ ID NO: 2220 - DNA, 21 bp, Amaranthus palmeri
gcaattgcccgaatcctttta

SEQ ID NO: 2221 - DNA, 21 bp, Amaranthus palmeri
tagctcaatatcaaggtccta

SEQ ID NO: 2222 - DNA, 21 bp, Amaranthus palmeri
tcataagcaccctctatacac
